(19) United States
(12) Patent Application Publication
(10) Pub. No.: US 2020/0010835 A1
(43) Pub. Date: Jan. 9, 2020

(54) INCORPORATION OF UNNATURAL AMINO ACIDS INTO PROTEINS USING BASE EDITING

(71) Applicant: President and Fellows of Harvard College, Cambridge, MA (US)

(72) Inventors: Juan Pablo Maianti, Revere, MA (US); David R. Liu, Lexington, MA (US); Luke W. Koblan, Brookline, MA (US)

(73) Assignee: President and Fellows of Harvard College, Cambridge, MA (US)

(21) Appl. No.: 16/327,744

(22) PCT Filed: Aug. 24, 2017
(86) PCT No.: PCT/US17/48390

§ 371 Date: Feb. 22, 2019

Related U.S. Application Data
(60) Provisional application No. 62/379,122, filed on Aug. 24, 2016.

(51) Int. Cl. C12N 15/67; C12N 15/10; C12N 9/22; C12N 9/78

(52) U.S. Cl. CPC C12N 15/67; C12N 15/102; C07K 2319/81; C12N 9/78; C12Y 305/04001; C12N 9/22

(57) ABSTRACT

Provided herein are systems, compositions, and methods for the incorporation of unnatural amino acids into proteins via nonsense suppression or rare codon suppression. Nonsense codons and rare codons may be introduced into the coding sequence of a protein of interest using a CRISPR/Cas9-based nucleobase editor described herein. The nucleobase editors are able to be programmed by guide nucleotide sequences to edit the target codons in the coding sequence of the protein of interest. Also provided are application enabled by the technology described herein.

### RELATED APPLICATIONS

[0001] This application is a national stage filing under 35 U.S.C. § 371 of international PCT application, PCT/US2017/048390, filed Aug. 24, 2017, which claims priority under 35 U.S.C. § 119(e) to U.S. Provisional Application, U.S. Ser. No. 62/379,122, filed on Aug. 24, 2016, each of which is incorporated herein by reference.

### GOVERNMENT SUPPORT

[0002] This invention was made with government support under grant number DGE1144152 awarded by the National Science Foundation, and under grant number GM095450 awarded by the National Institutes of Health. The government has certain rights in the invention.

### BACKGROUND

[0003] The ability to study cellular systems and the mechanisms that drive disease-relevant and fundamental biological processes relies on a suite of chemical and genetic perturbagens to interrogate these complex systems in situ using experimental paradigms as close to the native state as possible. To date, there are no programmable tools for unbiased high-throughput interrogation of the proteome in living cells. Currently available paradigms are used to study individual proteins, or at best small collections of proteins. Medium-throughput screening modalities have been engineered for specific families of proteins, for example, in activity-based protein profiling (ABPP), but these tools are limited to proteins whose enzymatic activity can be readily harnessed using a reactive biochemical handle.

### SUMMARY

[0004] Described herein are systems, methods, and compositions for incorporation of unnatural amino acids into virtually any protein. The methodology relies on CRISPR/Cas9-based base-editing technology coupled with stop-codon or rare codon suppression to incorporate unnatural amino acids into proteins. Provided herein are methods to treat live cells with libraries of nucleotide sequences (e.g., guide RNA or guide ssDNA) complexed with Cas9 nucleobase editors to transform contain codons (e.g., the target codons listed Table 2) into stop codons or rare codons in a guide nucleotide sequence-programmable manner. Further provided herein are applications enabled by this novel concept, as well as the chemical tools/probes required to connect genome/base-editing and proteome-wide interrogation of protein functions.

[0005] Accordingly, some aspects of the present disclosure provide methods of incorporating an unnatural amino acid into a protein of interest at one or more specific position(s), the method comprising: (i) contacting a polynucleotide encoding the protein of interest with a fusion protein comprising (a) a guide nucleotide sequence-programmable DNA-binding protein domain; and (b) a cytosine deaminase domain, wherein the fusion protein is associated with a guide nucleotide sequence, and whereby the contacting results in changing a target codon to a stop codon or a rare codon via deamination of a cytosine (C) base; (ii) using the polynucleotide containing the stop or rare codon in a translation system, whereby the unnatural amino acids are incorporated into the protein of interest at the suppressible stop codon or rare codon during translation of the protein, wherein the polynucleotide comprises a coding strand and a complementary strand.

[0006] In some embodiments, the guide nucleotide sequence-programmable DNA binding protein domain is selected from the group consisting of: a nuclease inactive Cas9 (dCas9), a nuclease inactive Cpf1, and a nuclease inactive Argonaute.

[0007] In some embodiments, the guide nucleotide sequence-programmable DNA-binding protein domain is a nuclease inactive Cas9 (dCas9).

[0008] In some embodiments, the amino acid sequence of the dCas9 domain comprises mutations corresponding to a D10A and/or H840A mutation in SEQ ID NO: 1.

[0009] In some embodiments, the amino acid sequence of the dCas9 domain comprises a mutation corresponding to a D10A mutation in SEQ ID NO: 1, and wherein the dCas9 domain comprises a histidine at a position corresponding to amino acid 840 of SEQ ID NO: 1.

[0010] In some embodiments, the guide nucleotide sequence-programmable DNA-binding protein domain comprises a nuclease inactive Cpf1 (dCpf1).

[0011] In some embodiments, the dCpf1 is from Acidaminococcus or Lachnospiraceae.

[0012] In some embodiments, the guide nucleotide sequence-programmable DNA-binding protein domain comprises a nuclease inactive Argonaute (dAgo).

[0013] In some embodiments, the (dAgo) is from Natronobacterium gregoryi (dNgAgo).

[0014] The method of any of claims 1-9, wherein the cytosine deaminase is an apolipoprotein B mRNA-editing complex (APOBEC) family deaminase.

[0015] In some embodiments, the cytosine deaminase is selected from the group consisting of APOBEC1, APOBEC2, APOBEC3A, APOBEC3B, APOBEC3C, APOBEC3D, APOBEC3F, APOBEC3G deaminase, APOBEC3H deaminase, APOBEC4 deaminase, and activation-induced deaminase (AID).

[0016] In some embodiments, the cytosine deaminase comprises an amino acid sequence of any one of SEQ ID NOs: 270-288 and 378-381.

[0017] In some embodiments, the fusion protein of (a) further comprises a uracil glycosylase inhibitor (UGI) domain. In some embodiments, the cytosine deaminase domain is fused to the N-terminus of the guide nucleotide sequence-programmable DNA-binding protein domain. In some embodiments, the UGI domain is fused to the C-terminus of the guide nucleotide sequence-programmable DNA-binding protein domain. In some embodiments, the cytosine deaminase and the guide nucleotide sequence-programmable DNA-binding protein domain is fused via an optional linker. In some embodiments, the UGI domain is fused to the dCas9 domain via an optional linker.

[0018] In some embodiments, the fusion protein comprises the structure NH₂-[cytosine deaminase domain]-[optional linker sequence]-[guide nucleotide sequence-programmable DNA-binding protein domain]-[optional linker sequence]-[UGI domain]-COOH.

[0019] In some embodiments, the linker comprises (GGGS)ₙ (SEQ ID NO: 362), (GGGGS)ₙ (SEQ ID NO: 363), (G)ₙ, (EAAAK)ₙ (SEQ ID NO: 364), (GGS)ₙ, SGSETPGTSESATPES (SEQ ID NO: 365), or (XP)ₙ motif, or a combination of any of these, wherein n is independently an integer between 1 and 30, and wherein X is any amino acid. In some embodiments, the linker comprises the amino acid sequence SGSETPGTSESATPES (SEQ ID NO: 365). In some embodiments, the linker is (GGS)ₙ, and wherein n is 1, 3, or 7.

[0020] In some embodiments, the fusion protein comprises the amino acid sequence of any one of SEQ ID NO: 291-295 and 382-386.

[0021] In some embodiments, the target codon is changed to a stop codon selected from the group consisting of TAG (Amber), TGA(Opal), and TAA (Ochre).

[0022] In some embodiments, the target codon is a sense codon selected from the group consisting of CAG, TGG, CGA, CAA, and CGG.

[0023] In some embodiments, the change of codon is selected from the group consisting of: CAG to TAG, TGG to TAG, CGA to TGA, CAA to TAA, TGG to TGA, CGG to TAG, and CGA to TAA.

[0024] In some embodiments, the CAG to TAG is via the deamination of the first C on the coding strand. In some embodiments, the CGA to TGA change is via the deamination of the first C on the coding strand. In some embodiments, the CAA to TAA change is via the deamination of the first C on the coding strand. In some embodiments, the TGG to TAG change is via the deamination of the second C on the complementary strand. In some embodiments, the TGG to TGA change is via the deamination of the third C on the complementary strand. In some embodiments, the CGG to TAG change is via the deamination of the first C on the coding strand, and the deamination of the second C on the complementary strand. In some embodiments, the CGA to TAA change is via the deamination of the first C on the coding strand, and the deamination of the second C on the complementary strand. In some embodiments, the target codon is a non-sense codon selected from TGA and TAG. In some embodiments, the change of codon is selected from TGA to TAA, and TAG to TAA. In some embodiments, wherein the TGA to TAA change is via the deamination of the second C on the complementary strand. In some embodiments, the TAG to TAA change is via the deamination of the third C on the complementary strand.

[0025] In some embodiments, the target codon is changed to a rare codon selected from the group consisting of AGG, ATA, AGT, TTT, and TTC. In some embodiments, the target codon is selected from the group consisting of GGG, ATG, ACA, GGT, TCT, TCC, CTT, and CTC. In some embodiments, the change of codon is selected from the group consisting of: GGG to AGG, ATG to ATA, GGT to AGT, ACA to ATA, CTC to TTC, TCT to TTT, TCC to TTC, CTT to TTT, CTC to TTT, and TCC to TTT.

[0026] In some embodiments, the GGG to AGG change is via the deamination of the first C on the complementary strand. In some embodiments, the ATG to ATA change is via the deamination of the first C on the complementary strand. In some embodiments, the GGT to AGT change is via the deamination of the first C on the complementary strand. In some embodiments, the ACA to ATA change is via the deamination of the second C on the coding strand. In some embodiments, the CTC to TTC change is via the deamination of the first C on the coding strand. In some embodiments, the TCT to TTT change is via the deamination of the second C on the coding strand. In some embodiments, the TCC to TTC change is via the deamination of the second C on the coding strand. In some embodiments, the CTT to TTT change is via the deamination of the first C on the coding strand. In some embodiments, the CTC to TTT change is via the deamination of the first C and the third C on the coding strand. In some embodiments, the TCC to TTT change is via the deamination of the second C and the third C on the coding strand.

[0027] In some embodiments, a PAM sequence is located 3′ of the C being changed. In some embodiments, the PAM sequence is selected from the group consisting of: NGG, NGAN, NGNG, NGAG, NGCG, NNGRRT, NGRRN, NNNRRT, NNNGATT, NNAGAAW, NAAAC, NNT, NNNT, and YNT, wherein Y is pyrimidine, and N is any nucleobase. In some embodiments, no PAM sequence is located 3′ of the C being changed.

[0028] In some embodiments, the translation system comprises: (a) an orthogonal tRNA (OtRNA); (b) an orthogonal aminoacyl tRNA synthetase (ORS); and (c) an unnatural amino acid, wherein the ORS preferentially aminoacylates the OtRNA with the unnatural amino acid, and the OtRNA recognizes at least one suppressible stop codon.

[0029] In some embodiments, the translation system further comprises components needed for the translation of the protein of interest. In some embodiments, the components needed for the translation of the protein of interest comprise RNA polymerases, translation initiation factor, ribosomes, release factor-1, release factor-2, release factor-3, ATPs, GTPs, CTPs, UTPs, elongation factor-Tu, natural aminoacyl-tRNA synthetases, natural tRNAs, and/or natural amino acids.

[0030] In some embodiments, the OtRNA is derived from Tyr-tRNA, Glu-tRNA, Trp-tRNA, Leu-tRNA, Pyl-tRNA, Phe-tRNA, or amber-tRNA. In some embodiments, the OtRNA comprises a nucleotide sequence of any one of SEQ ID NOs: 5-7. In some embodiments, the ORS is derived from TyrRS, GluRS, TrpRS, LeuRS, Py1RS, PheRS, or amberRS. In some embodiments, the ORS comprises an amino acid sequence of any one of SEQ ID NOs: 330-361. In some embodiments, the ORS is encoded by a polynucleotide comprising the nucleic acid sequence of any one of SEQ ID NOs: 299-329.

[0031] In some embodiments, the unnatural amino acid is selected from the group consisting of: O-methyl-L-tyrosine, L-3-(2-naphthyl)alanine, 3-methyl-phenylalanine, O-4-allyl-L-tyrosine, 4-propyl-L-tyrosine, tri-O-acetyl-GlcNAcβ-serine, L-dopa, fluorinated phenylalanine, isopropyl-L-phenylalanine, p-azido-L-phenylalanine, p-acyl-L-phenylalanine, p-benzoyl-L-phenylalanine, L-phosphoserine, phosphonoserine, phosphonotyrosine, p-iodo-phenylalanine, p-bromophenylalanine, p-amino-L-phenylalanine, and isopropyl-L-phenylalanine.

[0032] In some embodiments, the unnatural amino acid is selected from the group consisting of: unnatural analogues of tyrosine, unnatural analogues of glutamine, unnatural analogues of phenylalanine, unnatural analogues of serine, unnatural analogues of threonine, unnatural analogues of alanine, unnatural analogues of cysteine, unnatural analogues of aspartic acid, unnatural analogues of glutamic acid, unnatural analogues of glycine, unnatural analogues of histidine, unnatural analogues of isoleucine, unnatural analogues of lysine, unnatural analogues of leucine, unnatural analogues of methionine, unnatural analogues of asparagine, unnatural analogues of proline, unnatural analogues of arginine, unnatural analogues of valine, and unnatural analogues of tryptophan.

[0033] In some embodiments, the unnatural amino acid is selected from the group consisting of: alkyl, aryl, acyl, azido, cyano, halo, hydrazine, hydrazide, hydroxyl, alkenyl, alkynl, ether, thiol, sulfonyl, seleno, ester, thioacid, borate, boronate, phospho, phosphono, phosphine, heterocyclic, enone, imine, aldehyde, hydroxylamine, keto, and amino-substituted amino acids, and any combinations thereof.

[0034] In some embodiments, the unnatural amino acid is selected from the group consisting of: amino acids with a photoactivatable cross-linker; spin-labeled amino acids; fluorescent amino acids; amino acids with a novel functional group; amino acids that covalently or noncovalently interacts with another molecule; metal binding amino acids; metal-containing amino acids; radioactive amino acids; photocaged and/or photoisomerizable amino acids; biotin or biotin-analogue containing amino acids; glycosylated or carbohydrate modified amino acids; keto containing amino acids; amino acids comprising polyethylene glycol or polyether; heavy atom substituted amino acids; chemically cleavable or photocleavable amino acids; amino acids with an elongated side chain; amino acids containing a toxic group; sugar substituted amino acids; carbon-linked sugar-containing amino acids; redox-active amino acid; α-hydroxy-containing acids; amino thio acid containing amino acid; α,α di-substituted amino acids; β-amino acids; and cyclic amino acids other than proline.

[0035] In some embodiments, the unnatural amino acid is selected from any unnatural amino acid in FIG. 3. In some embodiments, the unnatural amino acid comprises a click chemistry handle. In some embodiments, the click chemistry handle is an azide moiety. In some embodiments, the click chemistry handle is an alkyne moiety. In some embodiments, the click chemistry handle is an aziridine moiety. In some embodiments, the handle allows attachment of other chemical moieties to the protein.

[0036] In some embodiments, the other chemical moiety directs the protein for degradation by the proteasome. In some embodiments, the chemical moiety is selected from the group consisting of: thalidomide, pathalimide, PROTACs, and lenalidomide.

[0037] In some embodiments, the click chemistry handle enables the attachment of a localization signal to the protein. In some embodiments, the localization signal directs the localization of the protein to the nucleus, mitochondria, periplasm, or membrane.

[0038] In some embodiments, the click chemistry handle enables the attachment of chemical moieties that mimic post-translational modification of the protein, thereby altering the function of the protein. In some embodiments, the post-translational modification is lipidation, glycosylation, acetylation, methylation, or phosphorylation.

[0039] In some embodiments, the click chemistry handle enables the attachment of programmable interaction tags to the protein. In some embodiments, the programmable interaction tag is SNAP-tag, HALO-tag, Rapamycin, CLIP tag, or FK-506. In some embodiments, the programmable interaction tags allow the target protein to form complexes with other proteins.

[0040] In some embodiments, the protein is a therapeutic protein. In some embodiments, the protein is selected from the group consisting of: alpha-1 antitrypsin, angiostatin, antihemolytic factor, antibodies, apolipoprotein, apoprotein, atrial natriuretic factors, atrial natriuretic polypeptide, atrial peptides, C—X—C chemokine, T39765, NAP-2, ENA-78, Gro-a, Gro-b, Gro-c, IP-10, GCP-2, NAP-4, SDF-1, PF4, MIG, calcitonin, c-kit ligand, cytokines, CC chemokines, monocyte chemoattractant protein-1, monocyte chemoattractant protein-2, monocyte chemoattractant protein-3, monocyte inflammatory protein-1 alpha, monocyte inflammatory protein-i beta, RANTES, 1309, R83915, R91733, HCC1, T58847, D31065, T64262, CD40, CD40 ligand, hyalurin/CD44, C-kit Ligand, collagen, colony stimulating factor (CSF), complement factor 5a, complement inhibitor, complement receptor 1, cytokine, epithelial neutrophil activating peptide-78, GROα/MGSA, GROβ, GROγ, MIP-1α, MIP-16, MCP-1, epidermal growth factor (EGF), epithelial neutrophil activating peptide, erythropoietin (EPO), transcriptional activators, transcriptional suppressors, exfoliating toxin, factor IX, factor VII, factor VIII, factor X, fibroblast growth factor (FGF), fibrinogen, fibronectin, G-CSF, GM-CSF, glucocerebrosidase, gonadotropin, growth factors, growth factor receptors, hedgehog protein, hemoglobin, hepatocyte growth factor (HGF), signal transduction molecules, Hirudin, human serum albumin, ICAM-1, ICAM-1 receptors, LFA-1, LFA-1 receptors, insulin, insulin-like growth factors (IGF), IGF-I, IGF-II, interferons, IFN-α, IFN-β, IFN-γ, interleukin, IL-1, IL-2, IL-3, IL-4, IL-5, IL-6, IL-7, IL-8, IL-9, IL-10, IL-11, IL-12, keratinocyte growth factor (KGF), lactoferrin, leukemia inhibitory factor, luciferase, neurturin, neutrophil inhibitory factors (NIF), oncostatin M, osteogenic proteins, oncogene products, parathyroid hormone, PD-ECSF, PDGF, peptide hormones, human growth hormone, pleiotropin, protein A, protein G, pyrogenic exotoxins A, B, or C, relaxin, renin, SCF, soluble complement receptor I, soluble I-CAM 1, soluble interleukin receptors, TNF, soluble TNF receptors, somatomedin, somatostatin, somatotropin, streptokinase, superantigens, staphylococcal enterotoxins, SEA, SEB, SEC1, SEC2, SEC3, SED, SEE, steroid hormone receptors, superoxide dismutase, toxic shock syndrome toxins, thymosin alpha 1, tissue plasminogen activators, tumor growth factors (TGF), TGF-α, TGF-β, tumor necrosis factors, tumor necrosis factor alpha, tumor necrosis factor beta, tumor necrosis factor receptor (TNFR), VLA-4 proteins, VCAM-1 protein, vascular endothelial growth factor (VEGEF), urokinase, Mos, Ras, Raf, Met, p53, Tat, Fos, Myc, Jun, Myb, Rel, estrogen receptors, progesterone receptors, testosterone receptors, aldosterone receptors, BRD4, PRSS2, and LDL receptors.

[0041] In some embodiments, 1, 2, 3, 4, 5, 6, 7, 8, or more types of unnatural amino acids are incorporated into the protein of interest simultaneously. In some embodiments, the unnatural amino acid is incorporated into 1, 2, 3, 4, 5, 6, 7, 8, 9, 10, 11, 12, 13, 14, 15, or more proteins of interest. In some embodiments, the unnatural amino acid is incorporated proteome-wide. In some embodiments, a plurality of guide nucleotide sequences are used.

[0042] In some embodiments, the protein of interest is BRD4 or PRSS2. In some embodiments, the guide nucleotide sequence is a RNA. In some embodiments, the guide nucleotide sequence is selected from SEQ ID NOs: 367-373.

[0043] In some embodiments, the method is carried out in vitro. In some embodiments, The method of any one of claims 1-87, wherein the method is carried out in a cell. In some embodiments, the cell is a bacterial cell. In some embodiments, the cell is an Escherichia coli cell. In some embodiments, the cell is a mammalian cell. In some embodiments, the cell is a human cell.

[0044] Other aspects of the present disclosure provide cells comprising the fusion protein and the translation system described here, or cells comprising a polynucleotide encoding the fusion protein and the guide nucleotide sequence described herein.

[0045] In some embodiments, the cell further comprises the OtRNA and the ORS described herein or nucleic acid vectors encoding the OtRNA and the ORS described herein.

[0046] Other aspects of the present disclosure provide compositions comprising the fusion protein and the translation system described herein. In some embodiments, the composition further comprises unnatural amino acids.

[0047] Other aspects of the present disclosure provide kits comprising nucleic acid vectors for the expression of the fusion protein and the guide nucleotide sequence described herein. In some embodiments, the kit further comprises the translation system described herein. In some embodiments, the kit further comprises unnatural amino acids. In some embodiments, the kit further comprises instructions for use.

[0048] Other aspects of the present disclosure provide kits for in vitro incorporation of unnatural amino acids into a protein of interest comprising: (i) a fusion protein comprising (a) a guide nucleotide sequence-programmable DNA-binding protein domain; and (b) a cytosine deaminase domain, wherein the fusion protein is associated with a guide nucleotide sequence, and whereby the contacting results in changing a target codon to a stop codon or a rare codon via deamination of a cytosine (C) base; and (ii) a translation system comprising (a) an orthogonal tRNA (OtRNA); (b) an orthogonal aminoacyl tRNA synthetase (ORS); and (c) an unnatural amino acid, wherein the ORS preferentially aminoacylates the OtRNA with the unnatural amino acid, and the OtRNA recognizes at least one suppressible stop codon.

[0049] In some embodiments, the kit further comprises components needed for the translation of the protein. In some embodiments, the components comprise isolated RNA polymerases, isolated translation initiation factor, isolated ribosomes, isolated release factor-1, isolated release factor-2, isolated release factor-3, ATPs, GTPs, CTPs, UTPs, isolated elongation factor-Tu, natural aminoacyl-tRNA synthetases, natural tRNAs, natural amino acids, and/or unnatural amino acids. In some embodiments, the kit further comprises instructions for use.

[0050] Other aspects of the present disclosure provide methods of incorporating an unnatural amino acid into a protein of interest at one or more specific position(s), the method comprising: (i) contacting a polynucleotide encoding the protein of interest with a fusion protein comprising (a) a programmable DNA-binding protein domain; and (b) a deaminase domain, whereby the contacting results in changing a target codon to a stop codon or a rare codon via deamination of a target base; (ii) using the polynucleotide containing the stop or rare codon in a translation system, whereby the unnatural amino acids are incorporated into the protein of interest at the suppressible stop codon or rare codon during translation of the protein, wherein the polynucleotide comprises a coding strand and a complementary strand.

[0051] In some embodiments, the programmable DNA-binding domain is a Zinc Finger Nuclease domain. In some embodiments, the programmable DNA-binding domain is a TALEN domain.

[0052] In some embodiments, the programmable DNA-binding domain is a guide nucleotide sequence-programmable DNA binding protein domain.

[0053] In some embodiments, the programmable DNA-binding domain is selected from the group consisting of: nuclease-inactive Cas9 domains, nuclease inactive Cpf1 domains, nuclease inactive Argonaute domains, and variants thereof. In some embodiments, wherein the programmable DNA-binding domain is associated with a guide nucleotide sequence.

[0054] In some embodiments, the deaminase is a cytosine deaminase. In some embodiments, the target base is a cytosine (C) base and the deamination of the target C base results in a C to thymine (T) change.

[0055] The details of certain embodiments of the disclosure are set forth in the Detailed Description of Certain Embodiments, as described below. Other features, objects, and advantages of the disclosure will be apparent from the Definitions, Examples, Figures, and Claims.

### BRIEF DESCRIPTION OF THE DRAWINGS

[0056] The accompanying drawings, which constitute a part of this specification, illustrate several embodiments of the disclosure and together with the description, serve to explain the principles of the disclosure.

[0057] FIG. 1 shows the mechanism of stop-codon suppression to introduce unnatural amino acids into a protein. The mechanism is shown during the ribosomal translation of an arbitrary mRNA sequence derived from a protein-coding gene that can be edited using a Cas9 base editor (a dCas9-deaminase fusion protein)^{1-4,8-10,13,16}.

[0058] FIG. 2 shows examples of high-throughput proteome-wide applications enabled by the present disclosure.

[0059] FIG. 3 shows examples of functionalized amino acids that can be introduced into living cells using the present disclosure⁴.

[0060] FIG. 4 shows the synthesis of probe reagents for programmable induction of protein degradation, each of which is known to react with available unnatural amino acids (shown in FIG. 3).

[0061] FIG. 5 shows the synthesis of probe reagents for programmable plasma-membrane interaction, each of which is known to react with available unnatural amino acids (shown in FIG. 3).

[0062] FIG. 6 shows the synthesis of probe reagents for programmable nuclear or mitochondrial co-localization, each of which is known to react with available unnatural amino acids (shown in FIG. 3). The nuclear localization signal (NLS) corresponds to SEQ ID NO: 9. Similar chemistry is possible with a mitochondrial transport signal (MTS) peptide (SEQ ID NO: 10) as shown.

[0063] FIG. 7 shows the synthesis probe reagents for programmable formation of hetero-dimeric protein complexes, each of which is known to react with available unnatural amino acids (shown in FIG. 3). Similar chemistry is possible with the SNAP-tag and CLIP-tag as shown.

[0064] FIG. 8A shows the orthogonal charging of tRNAs and the application of multiplexed stop-codon suppression after base-editing.

[0065] FIG. 8B shows all possible transformations to stop codons, which are boxed.

### DEFINITIONS

[0066] As used herein and in the claims, the singular forms “a,” “an,” and “the” include the singular and the plural reference unless the context clearly indicates otherwise. Thus, for example, a reference to “an agent” includes a single agent and a plurality of such agents.

[0067] The term “translation system” refers to the components necessary to incorporate a naturally occurring amino acid into a growing polypeptide chain (protein). Components of a translation system can include, e.g., ribosomes, tRNAs, synthetases, mRNAs, and the like.

[0068] As used herein, the term “unnatural amino acid” refers to any amino acid, modified amino acid, and/or amino acid analogue that is not one of the 20 naturally occurring amino acids or seleno cysteine.

[0069] As used herein, the term “orthogonal” refers to a molecule (e.g., an orthogonal tRNA (OtRNA) and/or an orthogonal aminoacyl tRNA synthetase (ORS)) that is used with reduced efficiency by a system of interest (e.g., a translational system, e.g., a cell). Orthogonal refers to the inability or reduced efficiency, e.g., less than 20% efficient, less than 10% efficient, less than 5% efficient, or e.g., less than 1% efficient, of an orthogonal tRNA and/or orthogonal RS to function on the endogenous translation machinery. For example, an orthogonal tRNA in a translation system of interest aminoacylates any endogenous RS of a translation system of interest with reduced or even zero efficiency, when compared to aminoacylation of an endogenous tRNA by the endogenous RS. In another example, an orthogonal RS aminoacylates any endogenous tRNA in the translation system of interest with reduced or even zero efficiency, as compared to aminoacylation of the endogenous tRNA by an endogenous RS.

[0070] The term “proteome” refers to the entire set of proteins expressed by a genome, cell, tissue, or organism at a certain time. More specifically, it is the set of expressed proteins in a given type of cell or organism, at a given time, under certain conditions. The term is a blend of proteins and genome. “Proteome-wide” refers to each and every protein in the proteome without any bias.

[0071] The term “genome” refers to the genetic material of a cell or organism. It typically includes DNA (or RNA in the case of RNA viruses). The genome includes both the genes, the coding regions, the noncoding DNA, and the genomes of the mitochondria and chloroplasts. A genome does not typically include genetic material that is artificially introduced into a cell or organism, e.g., a plasmid that is transformed into a bacteria is not a part of the bacterial genome.

[0072] The term “interactome” refers to the whole set of molecular interactions in a particular cell. The term specifically refers to physical interactions among molecules (such as those among proteins, also known as protein—protein interactions) but can also describe sets of indirect interactions among genes (genetic interactions). Molecular interactions can occur between molecules belonging to different biochemical families (proteins, nucleic acids, lipids, carbohydrates, metabolites, etc.) and also within a given family. Whenever such molecules are connected by physical interactions, they form molecular interaction networks that are generally classified by the nature of the compounds involved. Most commonly, interactome refers to protein—protein interaction (PPI) networks (PIN) or subsets thereof.

[0073] A “programmable DNA-binding protein,” as used herein, refers to DNA binding proteins that can be programmed to navigate to any desired target nucleotide sequence within the genome. To program the DNA-binding protein to bind a desired nucleotide sequence, the DNA binding protein may be modified to change its binding specificicity, e.g., zinc finger nuclease (ZFN) or transcription activator-like effector proteins (TALE). ZFNs are artificial restriction enzymes generated by fusing a zinc finger DNA-binding domain to a DNA-cleavage domain. Zinc finger domains can be engineered to target specific desired DNA sequences and this enables zinc-finger nucleases to target unique sequences within complex genomes. Transcription activator-like effector nucleases (TALEN) are restriction enzymes that can be engineered to cut specific sequences of DNA. They are made by fusing a TAL effector DNA-binding domain to a DNA cleavage domain (a nuclease which cuts DNA strands). Transcription activator-like effectors (TALEs) can be engineered to bind practically any desired DNA sequence, so when combined with a nuclease, DNA can be cut at specific locations. The restriction enzymes can be introduced into cells, for use in gene editing or for genome editing in situ, Methods of programming ZFNs and TALEs are familiar to one skilled in the art. For example, such methods are described in Maeder, et al., Mol. Cell 31 (2): 294-301, 2008; Carroll et al., Genetics Society of America, 188 (4): 773-782, 2011; Miller et al., Nature Biotechnology 25 (7): 778-785, 2007; Christian et al., Genetics 186 (2): 757-61, 2008; Li et al., Nucleic Acids Res 39 (1): 359-372, 2010; and Moscou et al., Science 326 (5959): 1501, 2009, the entire contents of each of which are incorporated herein by reference.

[0074] A “guide nucleotide sequence-programmable DNA-binding protein,” as used herein, refers to a protein, a polypeptide, or a domain that is able to bind DNA, and the binding to its target DNA sequence is mediated by a guide nucleotide sequence. Thus, it is appreciated that the guide nucleotide sequence-programmable DNA-binding protein binds to a guide nucleotide sequence. The “guide nucleotide” may be a RNA molecule or a DNA molecule (e.g., a single-stranded DNA or ssDNA molecule) that is complementary to the target sequence and can guide the DNA binding protein to the target sequence. As such, a guide nucleotide sequence-programmable DNA-binding protein may be a RNA-programmable DNA-binding protein (e.g., a Cas9 protein), or an ssDNA-programmable DNA-binding protein (e.g., an Argonaute protein). “Programmable” means the DNA-binding protein may be programmed to bind any DNA sequence that the guide nucleotide targets.

[0075] In some embodiments, the guide nucleotide sequence exists as a single nucleotide molecule and comprises comprise two domains: (1) a domain that shares homology to a target nucleic acid (e.g., and directs binding of a guide nucleotide sequence-programmable DNA-binding protein to the target); and (2) a domain that binds a guide nucleotide sequence-programmable DNA-binding protein. In some embodiments, the guide nucleotide is a guide RNA (gRNA). In some embodiments, domain (2) of the gRNA corresponds to a sequence known as a tracrRNA, and comprises a stem-loop structure. For example, in some embodiments, domain (2) is identical or homologous to a tracrRNA as provided in Jinek et al., Science 337:816-821(2012), the entire contents of which is incorporated herein by reference. Other examples of gRNAs (e.g., those including domain 2) can be found in U.S. Provisional Patent Application, U.S. Ser. No. 61/874,682, filed Sep. 6, 2013, entitled “Switchable Cas9 Nucleases And Uses Thereof,” and U.S. Provisional Patent Application, U.S. Ser. No. 61/874,746, filed Sep. 6, 2013, entitled “Delivery System For Functional Nucleases,” the entire contents of each are hereby incorporated by reference in their entirety.

[0076] Because the guide nucleotide sequence hybridizes to target DNA sequence, the guide nucleotide sequence-programmable DNA-binding proteins are able to be targeted, in principle, to any sequence specified by the guide nucleotide sequence. Methods of using guide nucleotide sequence-programmable DNA-binding protein, such as Cas9, for site-specific cleavage (e.g., to modify a genome) are known in the art (see e.g., Cong, L. et al. Science 339, 819-823 (2013); Mali, P. et al. Science 339, 823-826 (2013); Hwang, W. Y. et al. Nature biotechnology 31, 227-229 (2013); Jinek, M. et al. eLife 2, e00471 (2013); Dicarlo, J. E. et al. Nucleic acids research (2013); Jiang, W. et al. Nature biotechnology 31, 233-239 (2013); the entire contents of each of which are incorporated herein by reference).

[0077] It is to be understood that any DNA binding domain that is programmable by a guide nucleotide sequence may be used in accordance with the present disclosure. For example, in some embodiments, the guide nucleotide sequence-programmable DNA binding protein may be a Cas9 protein, or a variant thereof. One skilled in the art would understand that the present disclosure is not limited to the use of Cas9 as the guide nucleotide sequence-programmable DNA binding protein, but that other DNA binding proteins that adopt similar mechanism of target sequence binding may also be used.

[0078] As used herein, the term “Cas9” or “Cas9 nuclease” refers to an RNA-guided nuclease comprising a Cas9 protein, a fragment, or a variant thereof. A Cas9 nuclease is also referred to sometimes as a casn1 nuclease or a CRISPR (clustered regularly interspaced short palindromic repeat)-associated nuclease. CRISPR is an adaptive immune system that provides protection against mobile genetic elements (viruses, transposable elements and conjugative plasmids). CRISPR clusters contain spacers, sequences complementary to antecedent mobile elements, and target invading nucleic acids. CRISPR clusters are transcribed and processed into CRISPR RNA (crRNA). In type II CRISPR systems correct processing of pre-crRNA requires a trans-encoded small RNA (tracrRNA), endogenous ribonuclease 3 (rnc) and a Cas9 protein. The tracrRNA serves as a guide for ribonuclease 3-aided processing of pre-crRNA. Subsequently, Cas9/crRNA/tracrRNA endonucleolytically cleaves linear or circular dsDNA target complementary to the spacer. The target strand not complementary to crRNA is first cut endonucleolytically, then trimmed 3′-5′ exonucleolytically. In nature, DNA-binding and cleavage typically requires protein and both RNAs. However, single guide RNAs (“sgRNA”, or simply “gNRA”) can be engineered so as to incorporate aspects of both the crRNA and tracrRNA into a single RNA species. See, e.g., Jinek et al., Science 337:816-821(2012), the entire contents of which is incorporated herein by reference.

[0079] Cas9 nuclease sequences and structures are well known to those of skill in the art (see, e.g., Ferretti et al., Proc. Natl. Acad. Sci. 98:4658-4663(2001); Deltcheva E. et al., Nature 471:602-607(2011); and Jinek et al., Science 337:816-821(2012), the entire contents of each of which are incorporated herein by reference). Cas9 orthologs have been described in various species, including, but not limited to, S. pyogenes and S. thermophilus. Additional suitable Cas9 nucleases and sequences will be apparent to those of skill in the art based on this disclosure, and such Cas9 nucleases and sequences include Cas9 sequences from the organisms and loci disclosed in Chylinski et al., (2013) RNA Biology 10:5, 726-737; the entire contents of which are incorporated herein by reference. In some embodiments, wild type Cas9 corresponds to Cas9 from Streptococcus pyogenes (NCBI Reference Sequence: NC_002737.2, SEQ ID NO: 4 (nucleotide); and Uniport Reference Sequence: Q99ZW2, SEQ ID NO: 1 (amino acid).

(SEQ ID NO: 4)
ATGGATAAGAAATACTCAATAGGCTTAGATATCGGCACAAATAGCGTCGGATGGGCGGTGATCAC
TGATGAATATAAGGTTCCGTCTAAAAAGTTCAAGGTTCTGGGAAATACAGACCGCCACAGTATCA
AAAAAAATCTTATAGGGGCTCTTTTATTTGACAGTGGAGAGACAGCGGAAGCGACTCGTCTCAAA
CGGACAGCTCGTAGAAGGTATACACGTCGGAAGAATCGTATTTGTTATCTACAGGAGATTTTTTCA
AATGAGATGGCGAAAGTAGATGATAGTTTCTTTCATCGACTTGAAGAGTCTTTTTTGGTGGAAGAA
GACAAGAAGCATGAACGTCATCCTATTTTTGGAAATATAGTAGATGAAGTTGCTTATCATGAGAAA
TATCCAACTATCTATCATCTGCGAAAAAAATTGGTAGATTCTACTGATAAAGCGGATTTGCGCTTA
ATCTATTTGGCCTTAGCGCATATGATTAAGTTTCGTGGTCATTTTTTGATTGAGGGAGATTTAAATC
CTGATAATAGTGATGTGGACAAACTATTTATCCAGTTGGTACAAACCTACAATCAATTATTTGAAG
AAAACCCTATTAACGCAAGTGGAGTAGATGCTAAAGCGATTCTTTCTGCACGATTGAGTAAATCAA
GACGATTAGAAAATCTCATTGCTCAGCTCCCCGGTGAGAAGAAAAATGGCTTATTTGGGAATCTCA
TTGCTTTGTCATTGGGTTTGACCCCTAATTTTAAATCAAATTTTGATTTGGCAGAAGATGCTAAATT
ACAGCTTTCAAAAGATACTTACGATGATGATTTAGATAATTTATTGGCGCAAATTGGAGATCAATA
TGCTGATTTGTTTTTGGCAGCTAAGAATTTATCAGATGCTATTTTACTTTCAGATATCCTAAGAGTA
AATACTGAAATAACTAAGGCTCCCCTATCAGCTTCAATGATTAAACGCTACGATGAACATCATCAA
GACTTGACTCTTTTAAAAGCTTTAGTTCGACAACAACTTCCAGAAAAGTATAAAGAAATCTTTTTT
GATCAATCAAAAAACGGATATGCAGGTTATATTGATGGGGGAGCTAGCCAAGAAGAATTTTATAA
ATTTATCAAACCAATTTTAGAAAAAATGGATGGTACTGAGGAATTATTGGTGAAACTAAATCGTGA
AGATTTGCTGCGCAAGCAACGGACCTTTGACAACGGCTCTATTCCCCATCAAATTCACTTGGGTGA
GCTGCATGCTATTTTGAGAAGACAAGAAGACTTTTATCCATTTTTAAAAGACAATCGTGAGAAGAT
TGAAAAAATCTTGACTTTTCGAATTCCTTATTATGTTGGTCCATTGGCGCGTGGCAATAGTCGTTTT
GCATGGATGACTCGGAAGTCTGAAGAAACAATTACCCCATGGAATTTTGAAGAAGTTGTCGATAA
AGGTGCTTCAGCTCAATCATTTATTGAACGCATGACAAACTTTGATAAAAATCTTCCAAATGAAAA
AGTACTACCAAAACATAGTTTGCTTTATGAGTATTTTACGGTTTATAACGAATTGACAAAGGTCAA
ATATGTTACTGAAGGAATGCGAAAACCAGCATTTCTTTCAGGTGAACAGAAGAAAGCCATTGTTG
ATTTACTCTTCAAAACAAATCGAAAAGTAACCGTTAAGCAATTAAAAGAAGATTATTTCAAAAAA
ATAGAATGTTTTGATAGTGTTGAAATTTCAGGAGTTGAAGATAGATTTAATGCTTCATTAGGTACC
TACCATGATTTGCTAAAAATTATTAAAGATAAAGATTTTTTGGATAATGAAGAAAATGAAGATATC
TTAGAGGATATTGTTTTAACATTGACCTTATTTGAAGATAGGGAGATGATTGAGGAAAGACTTAAA
ACATATGCTCACCTCTTTGATGATAAGGTGATGAAACAGCTTAAACGTCGCCGTTATACTGGTTGG
GGACGTTTGTCTCGAAAATTGATTAATGGTATTAGGGATAAGCAATCTGGCAAAACAATATTAGAT
TTTTTGAAATCAGATGGTTTTGCCAATCGCAATTTTATGCAGCTGATCCATGATGATAGTTTGACAT
TTAAAGAAGACATTCAAAAAGCACAAGTGTCTGGACAAGGCGATAGTTTACATGAACATATTGCA
AATTTAGCTGGTAGCCCTGCTATTAAAAAAGGTATTTTACAGACTGTAAAAGTTGTTGATGAATTG
GTCAAAGTAATGGGGCGGCATAAGCCAGAAAATATCGTTATTGAAATGGCACGTGAAAATCAGAC
AACTCAAAAGGGCCAGAAAAATTCGCGAGAGCGTATGAAACGAATCGAAGAAGGTATCAAAGAA
TTAGGAAGTCAGATTCTTAAAGAGCATCCTGTTGAAAATACTCAATTGCAAAATGAAAAGCTCTAT
CTCTATTATCTCCAAAATGGAAGAGACATGTATGTGGACCAAGAATTAGATATTAATCGTTTAAGT
GATTATGATGTCGATCACATTGTTCCACAAAGTTTCCTTAAAGACGATTCAATAGACAATAAGGTC
TTAACGCGTTCTGATAAAAATCGTGGTAAATCGGATAACGTTCCAAGTGAAGAAGTAGTCAAAAA
GATGAAAAACTATTGGAGACAACTTCTAAACGCCAAGTTAATCACTCAACGTAAGTTTGATAATTT
AACGAAAGCTGAACGTGGAGGTTTGAGTGAACTTGATAAAGCTGGTTTTATCAAACGCCAATTGG
TTGAAACTCGCCAAATCACTAAGCATGTGGCACAAATTTTGGATAGTCGCATGAATACTAAATACG
ATGAAAATGATAAACTTATTCGAGAGGTTAAAGTGATTACCTTAAAATCTAAATTAGTTTCTGACT
TCCGAAAAGATTTCCAATTCTATAAAGTACGTGAGATTAACAATTACCATCATGCCCATGATGCGT
ATCTAAATGCCGTCGTTGGAACTGCTTTGATTAAGAAATATCCAAAACTTGAATCGGAGTTTGTCT
ATGGTGATTATAAAGTTTATGATGTTCGTAAAATGATTGCTAAGTCTGAGCAAGAAATAGGCAAA
GCAACCGCAAAATATTTCTTTTACTCTAATATCATGAACTTCTTCAAAACAGAAATTACACTTGCA
AATGGAGAGATTCGCAAACGCCCTCTAATCGAAACTAATGGGGAAACTGGAGAAATTGTCTGGGA
TAAAGGGCGAGATTTTGCCACAGTGCGCAAAGTATTGTCCATGCCCCAAGTCAATATTGTCAAGAA
AACAGAAGTACAGACAGGCGGATTCTCCAAGGAGTCAATTTTACCAAAAAGAAATTCGGACAAGC
TTATTGCTCGTAAAAAAGACTGGGATCCAAAAAAATATGGTGGTTTTGATAGTCCAACGGTAGCTT
ATTCAGTCCTAGTGGTTGCTAAGGTGGAAAAAGGGAAATCGAAGAAGTTAAAATCCGTTAAAGAG
TTACTAGGGATCACAATTATGGAAAGAAGTTCCTTTGAAAAAAATCCGATTGACTTTTTAGAAGCT
AAAGGATATAAGGAAGTTAAAAAAGACTTAATCATTAAACTACCTAAATATAGTCTTTTTGAGTTA
GAAAACGGTCGTAAACGGATGCTGGCTAGTGCCGGAGAATTACAAAAAGGAAATGAGCTGGCTCT
GCCAAGCAAATATGTGAATTTTTTATATTTAGCTAGTCATTATGAAAAGTTGAAGGGTAGTCCAGA
AGATAACGAACAAAAACAATTGTTTGTGGAGCAGCATAAGCATTATTTAGATGAGATTATTGAGC
AAATCAGTGAATTTTCTAAGCGTGTTATTTTAGCAGATGCCAATTTAGATAAAGTTCTTAGTGCAT
ATAACAAACATAGAGACAAACCAATACGTGAACAAGCAGAAAATATTATTCATTTATTTACGTTG
ACGAATCTTGGAGCTCCCGCTGCTTTTAAATATTTTGATACAACAATTGATCGTAAACGATATACG
TCTACAAAAGAAGTTTTAGATGCCACTCTTATCCATCAATCCATCACTGGTCTTTATGAAACACGC
ATTGATTTGAGTCAGCTAGGAGGTGACTGA
(SEQ ID NO: 1)
MDKKYSIGLDIGTNSVGWAVITDEYKVPSKKFKVLGNTDRHSIKKNLIGALLFDSGETALATRLKRTAR
RRYTRRKNRICYLQEIFSNEMAKVDDSFFHRLEESFLVEEDKKHERHPIFGNIVDEVAYHEKYPTIYHLR
KKLVDSTDKADLRLIYLALAHMIKFRGHFLIEGDLNPDNSDVDKLFIQLVQTYNQLFEENPINASGVDA
KAILSARLSKSRRLENLIAQLPGEKKNGLFGNLIALSLGLTPNFKSNFDLAEDAKLQLSKDTYDDDLDN
LLAQIGDQYADLFLAAKNLSDAILLSDILRVNTEITKAPLSASMIKRYDEHHQDLTLLKALVRQQLPEK
YKEIFFDQSKNGYAGYIDGGASQLEFYKFIKPILEKMDGTEELLVKLNREDLLRKQRTFDNGSIPHQIHL
GELHAILRRQEDFYPFLKDNREKIEKILTFRIPYYVGPLARGNSRFAWMTRKSEETITPWNFEEVVDKGA
SAQSFIERMTNFDKNLPNEKVLPKHSLLYEYFTVYNELTKVKYVTEGMRKPAFLSGEQKKAIVDLLFK
TNRKVTVKQLKEDYFKKIECFDSVEISGVEDRFNASLGTYHDLLKIIKDKDFLDNEENEDILEDIVLTLT
LFEDREMIEERLKTYAHLFDDKVMKQLKRRRYTGWGRLSRKLINGIRDKQSGKTILDFLKSDGFANRN
FMQLIHDDSLTFKEDIQKAQVSGQGDSLHEHIANLAGSPAIKKGILQTVKVVDELVKVMGRHKPENIVI
EMARENQTTQKGQKNSRERMKRIEEGIKELGSQILKEHPVENTQLQNEKLYLYYLQNGRDMYVDQEL
DINRLSDYDVDHIVPQSFLKDDSIDNKVLTRSDKNRGKSDNVPSEEVVKKMKNYWRQLLNAKLITQRK
FDNLTKAERGGLSELDKAGFIKRQLVETRQITKHVAQILDSRMNTKYDENDKLIREVKVITLKSKLVSD
FRKDFQFYKVREINNYHHAHDAYLNAVVGTALIKKYPKLESEFVYGDYKVYDVRKMIAKSEQEIGKA
TAKYFFYSNIMNFFKTEITLANGEIRKRPLIETNGETGEIVWDKGRDFATVRKVLSMPQVNIVKKTEVQ
TGGFSKESILPKRNSDKLIARKKDWDPKKYGGFDSPTVAYSVLVVAKVEKGKSKKLKSVKELLGITIME
RSSFEKNPIDFLEAKGYKEVKKDLIIKLPKYSLFELENGRKRMLASAGELQKGNELALPSKYVNFLYLA
SHYEKLKGSPEDNEQKQLFVEQHKHYLDEIIEQISEFSKRVILADANLDKVLSAYNKHRDKPIREQAENI
IHLFTLTNLGAPAAFKYFDTTIDRKRYTSTKEVLDATLIHQSITGLYETRIDLSQLGGD
(single underline: HNHdomain; double underline: RuvC domain)

[0080] In some embodiments, Cas9 refers to Cas9 from: Corynebacterium ulcerans (NCBI Refs: NC_015683.1, NC_017317.1); Corynebacterium diphtheria (NCBI Refs: NC_016782.1, NC_016786.1); Spiroplasma syrphidicola (NCBI Ref: NC_021284.1); Prevotella intermedia (NCBI Ref: NC_017861.1); Spiroplasma taiwanense (NCBI Ref: NC_021846.1); Streptococcus iniae (NCBI Ref: NC_021314.1); Belliella baltica (NCBI Ref: NC_018010.1); Psychroflexus torquis I (NCBI Ref: NC_018721.1); Streptococcus thermophilus (NCBI Ref: YP_820832.1), Listeria innocua (NCBI Ref: NP_472073.1), Campylobacter jejuni (NCBI Ref: YP_002344900.1) or Neisseria. meningitidis (NCBI Ref: YP_002342100.1) or to a Cas9 from any of the organisms listed in Example 1 (SEQ ID NOs: 11-260).

[0081] To be used as in the fusion protein of the present disclosure as the guide nucleotide sequence-programmable DNA binding protein domain, a Cas9 protein needs to be nuclease inactive. A nuclease-inactive Cas9 protein may interchangeably be referred to as a “dCas9” protein (for nuclease-“dead” Cas9). Methods for generating a Cas9 protein (or a fragment thereof) having an inactive DNA cleavage domain are known (See, e.g., Jinek et al., Science. 337:816-821(2012); Qi et al., (2013) Cell. 28; 152(5):1173-83, the entire contents of each of which are incorporated herein by reference). For example, the DNA cleavage domain of Cas9 is known to include two subdomains, the HNH nuclease subdomain and the RuvC1 subdomain. The HNH subdomain cleaves the strand complementary to the gRNA, whereas the RuvC1 subdomain cleaves the non-complementary strand. Mutations within these subdomains can silence the nuclease activity of Cas9. For example, the mutations D10A and H840A completely inactivate the nuclease activity of S. pyogenes Cas9 (Jinek et al., Science. 337:816-821(2012); Qi et al., Cell. 28; 152(5):1173-83 (2013)).

dCas9 (D10A and H840A)
(SEQ ID NO: 2)
MDKKYSIGLAIGTNSVGWAVITDEYKVPSKKFKVLGNTDRHSIKKNLIGALLFDSGETAEATRLKRTAR
RRYTRRKNRICYLQEIFSNEMAKVDDSFFHRLEESFLVEEDKKHERHPIFGNIVDEVAYHEKYPTIYHLR
KKLVDSTDKADLRLIYLALAHMIKFRGHFLIEGDLNPDNSDVDKLFIQLVQTYNQLFEENPINASGVDA
KAILSARLSKSRRLENLIAQLPGEKKNGLFGNLIALSLGLTPNFKSNFDLAEDAKLQLSKDTYDDDLDN
LLAQIGDQYADLFLAAKNLSDAILLSDILRVNTEITKAPLSASMIKRYDEHHQDLTLLKALVRQQLPEK
YKEIFFDQSKNGYAGYIDGGASQLEFYKFIKPILEKMDGTEELLVKLNREDLLRKQRTFDNGSIPHQIHL
GELHAILRRQEDFYPFLKDNREKIEKILTFRIPYYVGPLARGNSRFAWMTRKSEETITPWNFEEVVDKGA
SAQSFIERMTNFDKNLPNEKVLPKHSLLYEYFTVYNELTKVKYVTEGMRKPAFLSGEQKKAIVDLLFK
TNRKVTVKQLKEDYFKKIECFDSVEISGVEDRFNASLGTYHDLLKIIKDKDFLDNEENEDILEDIVLTLT
LFEDREMIEERLKTYAHLFDDKVMKQLKRRRYTGWGRLSRKLINGIRDKQSGKTILDFLKSDGFANRN
FMQLIHDDSLTFKEDIQKAQVSGQGDSLHEHIANLAGSPAIKKGILQTVKVVDELVKVMGRHKPENIVI
EMARENQTTQKGQKNSRERMKRIEEGIKELGSQILKEHPVENTQLQNEKLYLYYLQNGRDMYVDQEL
DINRLSDYDVDAIVPQSFLKDDSIDNKVLTRSDKNRGKSDNVPSEEVVKKMKNYWRQLLNAKLITQRK
FDNLTKAERGGLSELDKAGFIKRQLVETRQITKHVAQILDSRMNTKYDENDKLIREVKVITLKSKLVSD
FRKDFQFYKVREINNYHHAHDAYLNAVVGTALIKKYPKLESEFVYGDYKVYDVRKMIAKSEQEIGKA
TAKYFFYSNIMNFFKTEITLANGEIRKRPLIETNGETGEIVWDKGRDFATVRKVLSMPQVNIVKKTEVQ
TGGFSKESILPKRNSDKLIARKKDWDPKKYGGFDSPTVAYSVLVVAKVEKGKSKKLKSVKELLGITIME
RSSFEKNPIDFLEAKGYKEVKKDLIIKLPKYSLFELENGRKRMLASAGELQKGNELALPSKYVNFLYLA
SHYEKLKGSPEDNEQKQLFVEQHKHYLDEIIEQISEFSKRVILADANLDKVLSAYNKHRDKPIREQAENI
IHLFTLTNLGAPAAFKYFDTTIDRKRYTSTKEVLDATLIHQSITGLYETRI
(single underline: HNHdomain; double underline: RuvC domain).

[0082] The dCas9 of the present disclosure encompasses completely inactive Cas9 or partially inactive Cas9. For example, the dCas9 may have one of the two nuclease domain inactivated, while the other nuclease domain remains active. Such a partially active Cas9 may also be referred to as a Cas9 nickase, due to its ability to cleave one strand of the targeted DNA sequence. The Cas9 nickase suitable for use in accordance with the present disclosure has an active HNH domain and an inactive RuvC domain and is able to cleave only the strand of the target DNA that is bound by the sgRNA. The Cas9 nickase of the present disclosure may comprise mutations that inactivate the RuvC domain, e.g., a D10A mutation. It is to be understood that any mutation that inactivates the RuvC domain may be included in a Cas9 nickase, e.g., insertion, deletion, or single or multiple amino acid substitution in the RuvC domain. In a Cas9 nickase described herein, while the RuvC domain is inactivated, the HNH domain remains activate. Thus, while the Cas9 nickase may comprise mutations other than those that inactivate the RuvC domain (e.g., D10A), those mutations do not affect the activity of the HNH domain. In a non-limiting Cas9 nickase example, the histidine at position 840 remains unchanged. The sequence of an exemplary Cas9 nickase suitable for the present disclosure is provided below.

Cas9 Nickase (D10A)
(SEQ ID NO: 3)
MDKKYSIGLAIGTNSVGWAVITDEYKVPSKKFKVLGNTDRHSIKKNLIGALLFDSGETAEATRLKRTAR
RRYTRRKNRICYLQEIFSNEMAKVDDSFFHRLEESFLVEEDKKHERHPIFGNIVDEVAYHEKYPTIYHLR
KKLVDSTDKADLRLIYLALAHMIKFRGHFLIEGDLNPDNSDVDKLFIQLVQTYNQLFEENPINASGVDA
KAILSARLSKSRRLENLIAQLPGEKKNGLFGNLIALSLGLTPNFKSNFDLAEDAKLQLSKDTYDDDLDN
LLAQIGDQYADLFLAAKNLSDAILLSDILRVNTEITKAPLSASMIKRYDEHHQDLTLLKALVRQQLPEK
YKEIFFDQSKNGYAGYIDGGASQLEFYKFIKPILEKMDGTEELLVKLNREDLLRKQRTFDNGSIPHQIHL
GELHAILRRQEDFYPFLKDNREKIEKILTFRIPYYVGPLARGNSRFAWMTRKSEETITPWNFEEVVDKGA
SAQSFIERMTNFDKNLPNEKVLPKHSLLYEYFTVYNELTKVKYVTEGMRKPAFLSGEQKKAIVDLLFK
TNRKVTVKQLKEDYFKKIECFDSVEISGVEDRFNASLGTYHDLLKIIKDKDFLDNEENEDILEDIVLTLT
LFEDREMIEERLKTYAHLFDDKVMKQLKRRRYTGWGRLSRKLINGIRDKQSGKTILDFLKSDGFANRN
FMQLIHDDSLTFKEDIQKAQVSGQGDSLHEHIANLAGSPAIKKGILQTVKVVDELVKVMGRHKPENIVI
EMARENQTTQKGQKNSRERMKRIEEGIKELGSQILKEHPVENTQLQNEKLYLYYLQNGRDMYVDQEL
DINRLSDYDVDHIVPQSFLKDDSIDNKVLTRSDKNRGKSDNVPSEEVVKKMKNYWRQLLNAKLITQRK
FDNLTKAERGGLSELDKAGFIKRQLVETRQITKHVAQILDSRMNTKYDENDKLIREVKVITLKSKLVSD
FRKDFQFYKVREINNYHHAHDAYLNAVVGTALIKKYPKLESEFVYGDYKVYDVRKMIAKSEQEIGKA
TAKYFFYSNIMNFFKTEITLANGEIRKRPLIETNGETGEIVWDKGRDFATVRKVLSMPQVNIVKKTEVQ
TGGFSKESILPKRNSDKLIARKKDWDPKKYGGFDSPTVAYSVLVVAKVEKGKSKKLKSVKELLGITIME
RSSFEKNPIDFLEAKGYKEVKKDLIIKLPKYSLFELENGRKRMLASAGELQKGNELALPSKYVNFLYLA
SHYEKLKGSPEDNEQKQLFVEQHKHYLDEIIEQISEFSKRVILADANLDKVLSAYNKHRDKPIREQAENI
IHLFTLTNLGAPAAFKYFDTTIDRKRYTSTKEVLDATLIHQSITGLYETRIDLSQLGGD
(single underline: HNHdomain; double underline: RuvC domain)

[0083] It is appreciated that when the term “dCas9” or “nuclease-inactive Cas9” is used herein, it refers to Cas9 variants that are inactive in both HNH and RuvC domains as well as Cas9 nickases. For example, the dCas9 used in the present disclosure may include the amino acid sequence set forth in SEQ ID NO: 2 or SEQ ID NO: 3. In some embodiments, the dCas9 may comprise other mutations that inactivate RuvC or HNH domain. Additional suitable mutations that inactivate Cas9 will be apparent to those of skill in the art based on this disclosure and knowledge in the field, and are within the scope of this disclosure. Such additional exemplary suitable nuclease-inactive Cas9 domains include, but are not limited to, D839A and/or N863A (See, e.g., Prashant et al., Nature Biotechnology. 2013; 31(9): 833-838, the entire contents of which are incorporated herein by reference), or K603R (See, e.g., Chavez et al., Nature Methods 12, 326-328, 2015, the entire contents of which is incorporated herein by reference). The term Cas9, dCas9, or Cas9 variant also encompasses Cas9, dCas9, or Cas9 variant from any organism. Also appreciated is that dCas9, Cas9 nickase, or other appropriate Cas9 variants from any organisms may be used in accordance with the present disclosure.

[0084] A “deaminase” refers to an enzyme that catalyzes the removal of an amine group from a molecule, or deamination. In some embodiments, the deaminase is a cytidine deaminase, catalyzing the hydrolytic deamination of cytidine or deoxycytidine to uridine or deoxyuridine, respectively. In some embodiments, the deaminase is a cytosine deaminase, catalyzing the hydrolytic deamination of cytosine to uracil (e.g., in RNA) or thymine (e.g., in DNA). In some embodiments, the deaminase is a naturally-occurring deaminase from an organism, such as a human, chimpanzee, gorilla, monkey, cow, dog, rat, or mouse. In some embodiments, the deaminase is a variant of a naturally-occurring deaminase from an organism, that does not occur in nature. For example, in some embodiments, the deaminase or deaminase domain is at least 50%, at least 55%, at least 60%, at least 65%, at least 70%, at least 75% at least 80%, at least 85%, at least 90%, at least 95%, at least 96%, at least 97%, at least 98%, at least 99%, or at least 99.5% identical to a naturally-occurring deaminase from an organism. A “cytosine deaminase” refers to an enzyme that catalyzes the chemical reaction “cytosine+H₂O⇄uracil+NH₃.” As it may be apparent from the reaction formula, such chemical reactions result in a C to U/T nucleobase change. In the context of a gene, such nucleotide change, or mutation, may in turn lead to an amino acid residue change in the protein, which may affect the protein function, e.g., loss-of-function or gain-of-function.

[0085] One exemplary suitable class of cytosine deaminases is the apolipoprotein B mRNA-editing complex (APOBEC) family of cytosine deaminases encompassing eleven proteins that serve to initiate mutagenesis in a controlled and beneficial manner. The apolipoprotein B editing complex 3 (APOBEC3) enzyme provides protection to human cells against a certain HIV-1 strain via the deamination of cytosines in reverse-transcribed viral ssDNA. These cytosine deaminases all require a Zn²⁺-coordinating motif (His-X-Glu-X₂₃₋₂₆-Pro-Cys-X₂₋₄-Cys; SEQ ID NO: 289) and bound water molecule for catalytic activity. The Glu residue acts to activate the water molecule to a zinc hydroxide for nucleophilic attack in the deamination reaction. Each family member preferentially deaminates at its own particular “hotspot”, ranging from WRC (W is A or T, R is A or G) for hAID, to TTC for hAPOBEC3F. A recent crystal structure of the catalytic domain of APOBEC3G revealed a secondary structure comprised of a five-stranded β-sheet core flanked by six α-helices, which is believed to be conserved across the entire family. The active center loops have been shown to be responsible for both ssDNA binding and in determining “hotspot” identity. Overexpression of these enzymes has been linked to genomic instability and cancer, thus highlighting the importance of sequence-specific targeting. Another suitable cytosine deaminase is the activation-induced cytidine deaminase (AID), which is responsible for the maturation of antibodies by converting cytosines in ssDNA to uracils in a transcription-dependent, strand-biased fashion.

[0086] “Base editors” or “nucleobase editors,” as used herein, broadly refer to any of the fusion proteins described herein and in some embodiments, are capable of precisely deaminase a target base to convert it to a different base, e.g., the base editor may target C bases in a nucleic acid sequence and convert to T base. As such, a base editor may be a cytosine deaminase-dCas9 fusion protein. In some embodiments, the base editor may be a deaminase-dCas9-UGI fusion protein. In some embodiments, the base editor may be a APOBEC1-dCas9-UGI fusion protein. In some embodiments, the base editor may be APOBEC1-Cas9 nickase-UGI fusion protein. In some embodiments, the base editor may be APOBEC1-dCpf1-UGI fusion protein. In some embodiments, the base editor may be APOBEC1-dNgAgo-UGI fusion protein. In some embodiments, the base editor may be a pmCDA1-Cas9 nickase-UGI fusion protein. In some embodimetns, the base editor may be a human APOBEC3G-Cas9 nickase UGI fusion protein. Non-limiting exemplary sequences of the nucleobase editors described herein are provided in Example 1, SEQ ID NOs: 291-295 and 382-386. Such nucleobase editors and methods of using them for genome editing have been described in the art, e.g., in U.S. Pat. No. 9,068,179, US Patent Application Publications US 20150166980, US 20150166981, US 20150166982, US 20150166984, and US 20150165054, and US Provisional Applications, U.S. Ser. No. 62/245,828, 62/279,346, 62/311,763, 62/322,178, and 62/357,352, and 62/370,700, 62/398,490, 62/498,686, PCT Application No. PCT/US2016/058344, U.S. patent application Ser. No. 15/331,852, and in Komor et al., Programmable editing of a target base in genomic DNA without double-stranded DNA cleavage, Nature, 533(7603):420-4, 2016, the entire contents of each of which are incorporated herein by reference.

[0087] The term “target site” or “target sequence” refers to a sequence within a nucleic acid molecule (e.g., a DNA molecule) that is deaminated by the fusion protein provided herein. In some embodiments, the target sequence is a polynucleotide (e.g., a DNA), wherein the polynucleotide comprises a coding strand and a complementary strand. The meaning of a “coding strand” and “complementary strand” is the common meaning of the terms in the art. In some embodiments, the target sequence is a sequence in the genome of a mammal. In some embodiments, the target sequence is a sequence in the genome of a human. The term “target codon” refers to the amino acid codon that is edited by the base editor and converted to a different codon via deamination of C base. In some embodiments, the target codon is edited in the coding strand. In some embodiments, the target codon is edited in the complementary strand.

[0088] The term “linker,” as used herein, refers to a chemical group or a molecule linking two molecules or moieties, e.g., two domains of a fusion protein, such as, for example, a nuclease-inactive Cas9 domain and a nucleic acid editing domain (e.g., a deaminase domain). Typically, the linker is positioned between, or flanked by, two groups, molecules, or other moieties and connected to each one via a covalent bond, thus connecting the two. In some embodiments, the linker is an amino acid or a plurality of amino acids (e.g., a peptide or protein). In some embodiments, the linker is an organic molecule, group, polymer, or chemical moiety. In some embodiments, the linker is 5-100 amino acids in length, for example, 5, 6, 7, 8, 9, 10, 11, 12, 13, 14, 15, 16, 17, 18, 19, 20, 21, 22, 23, 24, 25, 26, 27, 28, 29, 30, 30-35, 35-40, 40-45, 45-50, 50-60, 60-70, 70-80, 80-90, 90-100, 100-150, or 150-200 amino acids in length. Longer or shorter linkers are also contemplated.

[0089] The term “mutation,” as used herein, refers to a substitution of a residue within a sequence, e.g., a nucleic acid or amino acid sequence, with another residue, or a deletion or insertion of one or more residues within a sequence. Mutations are typically described herein by identifying the original residue followed by the position of the residue within the sequence and by the identity of the newly substituted residue. Various methods for making the amino acid substitutions (mutations) provided herein are well known in the art, and are provided by, for example, Green and Sambrook, Molecular Cloning: A Laboratory Manual (4^{th} ed., Cold Spring Harbor Laboratory Press, Cold Spring Harbor, N.Y. (2012)).

[0090] The terms “nucleic acid” and “nucleic acid molecule,” as used herein, refer to a compound comprising a nucleobase and an acidic moiety, e.g., a nucleoside, a nucleotide, or a polymer of nucleotides. Typically, polymeric nucleic acids, e.g., nucleic acid molecules comprising three or more nucleotides are linear molecules, in which adjacent nucleotides are linked to each other via a phosphodiester linkage. In some embodiments, “nucleic acid” refers to individual nucleic acid residues (e.g. nucleotides and/or nucleosides). In some embodiments, “nucleic acid” refers to an oligonucleotide chain comprising three or more individual nucleotide residues. As used herein, the terms “oligonucleotide” and “polynucleotide” can be used interchangeably to refer to a polymer of nucleotides (e.g., a string of at least three nucleotides). In some embodiments, “nucleic acid” encompasses RNA as well as single and/or double-stranded DNA. Nucleic acids may be naturally occurring, for example, in the context of a genome, a transcript, an mRNA, tRNA, rRNA, siRNA, snRNA, a plasmid, cosmid, chromosome, chromatid, or other naturally occurring nucleic acid molecule. On the other hand, a nucleic acid molecule may be a non-naturally occurring molecule, e.g., a recombinant DNA or RNA, an artificial chromosome, an engineered genome, or fragment thereof, or a synthetic DNA, RNA, DNA/RNA hybrid, or including non-naturally occurring nucleotides or nucleosides. Furthermore, the terms “nucleic acid,” “DNA,” “RNA,” and/or similar terms include nucleic acid analogs, e.g., analogs having other than a phosphodiester backbone. Nucleic acids can be purified from natural sources, produced using recombinant expression systems and optionally purified, chemically synthesized, etc. Where appropriate, e.g., in the case of chemically synthesized molecules, nucleic acids can comprise nucleoside analogs such as analogs having chemically modified bases or sugars, and backbone modifications. A nucleic acid sequence is presented in the 5′ to 3′ direction unless otherwise indicated. In some embodiments, a nucleic acid is or comprises natural nucleosides (e.g. adenosine, thymidine, guanosine, cytidine, uridine, deoxyadenosine, deoxythymidine, deoxyguanosine, and deoxycytidine); nucleoside analogs (e.g., 2-aminoadenosine, 2-thiothymidine, inosine, pyrrolo-pyrimidine, 3-methyl adenosine, 5-methylcytidine, 2-aminoadenosine, C5-bromouridine, C5-fluorouridine, C5-iodouridine, C5-propynyl-uridine, C5-propynyl-cytidine, C5-methylcytidine, 2-aminoadenosine, 7-deazaadenosine, 7-deazaguanosine, 8-oxoadenosine, 8-oxoguanosine, 0(6)-methylguanine, and 2-thiocytidine); chemically modified bases; biologically modified bases (e.g., methylated bases); intercalated bases; modified sugars (e.g., 2′-fluororibose, ribose, 2′-deoxyribose, arabinose, and hexose); and/or modified phosphate groups (e.g., phosphorothioates and 5′-N-phosphoramidite linkages).

[0091] The terms “protein,” “peptide,” and “polypeptide” are used interchangeably herein, and refer to a polymer of amino acid residues linked together by peptide (amide) bonds. The terms refer to a protein, peptide, or polypeptide of any size, structure, or function. Typically, a protein, peptide, or polypeptide will be at least three amino acids long. A protein, peptide, or polypeptide may refer to an individual protein or a collection of proteins. One or more of the amino acids in a protein, peptide, or polypeptide may be modified, for example, by the addition of a chemical entity such as a carbohydrate group, a hydroxyl group, a phosphate group, a farnesyl group, an isofarnesyl group, a fatty acid group, a linker for conjugation, functionalization, or other modification, etc. A protein, peptide, or polypeptide may also be a single molecule or may be a multi-molecular complex. A protein, peptide, or polypeptide may be just a fragment of a naturally occurring protein or peptide. A protein, peptide, or polypeptide may be naturally occurring, recombinant, or synthetic, or any combination thereof. The term “fusion protein” as used herein refers to a hybrid polypeptide which comprises protein domains from at least two different proteins. One protein may be located at the amino-terminal (N-terminal) portion of the fusion protein or at the carboxy-terminal (C-terminal) protein thus forming an “amino-terminal fusion protein” or a “carboxy-terminal fusion protein,” respectively. A protein may comprise different domains, for example, a nucleic acid binding domain (e.g., the gRNA binding domain of Cas9 that directs the binding of the protein to a target site) and a nucleic acid cleavage domain or a catalytic domain of a nucleic-acid editing protein. In some embodiments, a protein comprises a proteinaceous part, e.g., an amino acid sequence constituting a nucleic acid binding domain, and an organic compound, e.g., a compound that can act as a nucleic acid cleavage agent. In some embodiments, a protein is in a complex with, or is in association with, a nucleic acid, e.g., RNA. Any of the proteins provided herein may be produced by any method known in the art. For example, the proteins provided herein may be produced via recombinant protein expression and purification, which is especially suited for fusion proteins comprising a peptide linker. Methods for recombinant protein expression and purification are well known, and include those described by Green and Sambrook, Molecular Cloning: A Laboratory Manual (4^{th} ed., Cold Spring Harbor Laboratory Press, Cold Spring Harbor, N.Y. (2012)), the entire contents of which are incorporated herein by reference.

[0092] The term “subject,” as used herein, refers to an individual organism, for example, an individual mammal. In some embodiments, the subject is a human. In some embodiments, the subject is a non-human mammal. In some embodiments, the subject is a non-human primate. In some embodiments, the subject is a rodent. In some embodiments, the subject is a sheep, a goat, a cattle, a cat, or a dog. In some embodiments, the subject is a vertebrate, an amphibian, a reptile, a fish, an insect, a fly, or a nematode. In some embodiments, the subject is a research animal. In some embodiments, the subject is genetically engineered, e.g., a genetically engineered non-human subject. The subject may be of either sex and at any stage of development.

[0093] The term “recombinant” as used herein in the context of proteins or nucleic acids refers to proteins or nucleic acids that do not occur in nature, but are the product of human engineering. For example, in some embodiments, a recombinant protein or nucleic acid molecule comprises an amino acid or nucleotide sequence that comprises at least one, at least two, at least three, at least four, at least five, at least six, or at least seven mutations as compared to any naturally occurring sequence.

### DETAILED DESCRIPTION OF CERTAIN EMBODIMENTS

[0094] Described herein are systems, methods, and compositions for incorporating amino acids into a protein in vitro or in vivo. In some embodiments, the system enables high-throughput incorporation of unnatural amino acids into any protein in a living cell, enabling proteome-wide interrogation of protein function. Systems and methods to treat live cells with libraries of guide-RNAs complexed with nucleobase editors to transform amino acid codons in a guide nucleotide sequence-programmable manner are described. Further disclosed herein are methods of incorporating unnatural amino acids into proteins, which introduces new functional groups into proteins for a myriad of research applications and for therapeutic target discovery.

[0095] The methods disclosed herein require unique tools for the introduction of a codon suitable for the introduction of unnatural amino acids (e.g., a stop codon or a rare codon). The methods described herein enables incorporation of an unnatural amino acid into virtually any protein in living cells in a programmable manner. In some embodiments, one or more (e.g., 1, 2, 3, 4, 5, 6, 7, 8, 9, 10, 11, 12, 13, 14, 15 or more) unnatural amino acids may be introduced into one protein. In some embodiments, unnatural amino acids may be introduced into more than one proteins (e.g., 1, 2, 3, 4, 5, 6, 7, 8, 9, 10, 11, 12, 13, 14, 15 or more) in the proteome. In some embodiments, unnatural amino acids may be incorporated proteome-wide in a high throughput manner.

[0096] Accordingly, some aspects of the present disclosure provide methods and compositions for the conversion of a target amino acid codon to a stop codon or a rare codon. Other aspects of the present disclosure provide compositions and methods that may be used to decode the newly introduced stop codon or rare codon, thereby incorporating an unnatural amino acid into the protein of interest. Other aspects of the present disclosure provide nucleotide base editors that may be used for the conversion of a target codon to a stop codon or a rare codon. Such nucleotide base editors are programmable with a guide nucleotide sequence that targets it to the target codon to be changed. Yet other aspects of the present disclosure provide kits for the incorporation of unnatural amino acids into proteins, and various applications that are enabled by the systems, methods, and compositions described herein.

### Codon Conversion

[0097] The 20 naturally occurring amino acids are encoded by 61 amino acid codons (Table 1). A codon that encodes an amino acid is referred to herein as a “sense codon.” The overabundance in the number of codons allows many amino acids to be encoded by more than one codon. The genetic codes of different organisms are often biased towards using one of the several codons that encode the same amino acid over the others. Amino acid codons are decoded by transfer RNAs (tRNAs). A tRNA is a type of RNA molecule that helps decode a messenger RNA (mRNA) sequence into a protein. tRNAs function at specific sites in the ribosome during translation, which is a process by which a protein is synthesized from an mRNA molecule. tRNAs that decode the more frequently used amino acid codons tend to be more abundant, while the tRNAs that decode the less frequently used amino acid codons are less abundant. In some embodiments, these less frequently used amino acid codons are termed “rare codons.” In an organism, tRNAs that decode rare codons are typically expressed at a very low level, if expressed at all. Consequently, the presence of a rare codon in a messenger RNA (mRNA) often limits the rate of translation or stalls translation. Such stalling in translation in some cases leads to cleavage of the rare-codon containing mRNA and production of truncated proteins (Hayes et al., PNAS, Mar. 19, 2002, vol. 99, 3440-3445, the contents of which is incorporated herein by reference). By supplying the cell with exogenous tRNAs (e.g., a naturally occurring tRNA or a mutated tRNA that can decode the rare codon), it is possible to decode the rare codon at a rate high enough to avoid the translation stalling at rare codons. Consequently, the amino acid that is charged on the rare-codon recognizing tRNA is incorporated into the protein being translated. Such a process may herein be referred to as “rare codon suppression.” Examples of rare codons and the amino acids they encode include, without limitation, AGG (R), ATA (I), AGT (S), TTT (F), and TTC (F).

[0098] Codons that cannot be decoded into an amino acid are termed “nonsense codons.” Translation terminates at such nonsense codons. Thus, a nonsense codon is also termed a “stop codon” or a “termination codon.” There are three types of stop codons: TAG (amber), TAA (ochre), and TGA (opal). However, translation termination doesn't always occur when a stop codon is present, i.e., the stop codons may be suppressed and translational read-through may occcur when a stop codon is interpreted as a sense codon, that is, when a (standard or unnatural) amino acid is ‘encoded’ by the stop codon. Mutated tRNAs may be one cause of translational read-through. Translational read-through is very common in viruses and bacteria, and has also been found in humans as a gene regulatory principle. The process of a translational read-through event, where an amino acid is encoded by a stop codon and incorporated into the protein, may also be referred to as “nonsense suppression.”

TABLE 1
Amino Acid Codons

| Amino Acids | | | Codons |
|---|---|---|---|
| Alanine | Ala | A | GCA, GCG, GCC, GCU |
| Cysteine | Cys | C | UGC, UGU |
| Aspartic Acid | Asp | D | GAC, GAU |
| Glutamic Acid | Glu | E | GAA, GAG |
| Phenylalanine | Phe | F | UUC, UUU |
| Glycine | Gly | G | GGA, GGC, GGG, GGU |
| Histidine | His | H | CAC, CAU |
| Isoleucine | Ile | I | AUA, AUC, AUU |
| Lysine | Lys | K | AAA, AAG |
| Leucine | Leu | L | UUA, UUG, CUA, CUC, CUG, CUU |
| Methionine | Met | M | AUG |
| Asparagin | Asn | N | AAC, AAU |
| Proline | Pro | P | CCA, CCC, CCG, CCU |
| Glutamine | Gln | Q | CAA, CAG |
| Arginine | Arg | R | AGA, AGG, CGA, CGC, CGG, CGU |
| Serine | Ser | S | AGC, AGU, UCA, UCC, UCG, UCU |
| Threonine | Thr | T | ACA, ACC, ACG, ACU |
| Valine | Val | V | GUA, GUC, GUG, GUU |
| Tryptophan | Trp | W | UGG |
| Tyrosine | Tyr | Y | UAC, UAU |

[0099] To incorporate an unnatural amino acid in a protein at one or more desired locations, the existing sense codons at the target location may be altered to introduce a nonsense codon or a rare codon. Traditional methods of changing sense codons in a protein coding sequence include site-directed mutagenesis and other techniques that rely on the DNA repair pathway or homologous recombination pathways of the cell. Such methods are inefficient and laborious, and are not feasible in high-throughput formats.

[0100] Provided herein are systems, compositions, and methods for converting sense codons (that are not rare codons) to nonsense codons or rare codons via the deamination of a target base. In some embodiments, the target base is a C base that is convert it to a T base by the nucleobase editors described herein. In some embodiments, the nucleobase editors are fusion proteins comprising: (i) a programmable DNA binding protein domain (e.g., a nuclease inactive Cas9 or a Cas9 nickase); and (ii) a deaminase domain. In some embodiments, the deaminase domain is a cytosine deaminase, e.g., an APOBEC1. Nucleobase editors comprising a cytosine deaminase domain and methods of using them for genome editing have been described in the art, e.g., in U.S. Pat. No. 9,068,179, US Patent Application Publications US20150166980, US20150166981, US20150166982, US20150166984, and US20150165054, and U.S. Provisional Applications, 62/245,828, 62/279,346, 62/311,763, 62/322,178, and 62/357,352, and 62/370,700, 62/398,490, 62/498,686, PCT Application NO. PCT/US2016/058344, U.S. patent application Ser. No. 15/331,852, and in Komor et al., Programmable editing of a target base in genomic DNA without double-stranded DNA cleavage, Nature, 533(7603):420-4, 2016, the entire contents of each of which are incorporated herein by reference.

[0101] Cytosine deaminases are capable of converting a cytosine (C) base to a thymine (T) base via deamination. Thus, it is envisioned that, for sense codons containing a C base, the C base may be directly converted to T. For example, a CAG (Gln/Q) codon may be changed to a TAG (amber) codon via the deamination of the first C on the coding strand. For sense codons that contains a guanine (G) base, a C base is present on the complementary strand; and the G base may be converted to an adenosine (A) via the deamination of the C on the complementary strand. For example, a TGG (Trp/W) codon may be converted to a TAG (amber) codon via the deamination of the second C on the complementary strand. In some embodiments, two C to T changes are required to convert a codon to a nonsense codon or a rare codon. For example, a CGG (R) codon is converted to a TAG (amber) codon via the deamination of the first C on the coding strand and the deamination of the second C on the complementary strand. In some embodiments, a nonsense codon may be changed to a different nonsense codon, e.g., TGA to TAA, or TAG to TAA. Similarly, a sense codon can also be converted to a rare codon, e.g., ACA (Thr/T) to ATA (rare Ile/I).

[0102] Using the base editors described herein, at least 17 out of the 64 possible codons (>25%) may be converted to a nonsense codon or a rare codon via C to T conversion using a cytosine deaminase, allowing for the efficient incorporation of nonsense codons or rare codons into the coding sequence of a protein. Out of the target codons listed in Table 2, many of them encode polar amino acids, like arginine and glutamine. The polar amino acids are statistically enriched in surface-exposed regions of proteins. Additionally, tryptophan is statistically over-represented in protein-protein interaction regions (also termed hot spots). Thus, access to codons encoding these polar amino acids may be particularly useful because replacement of these amino acids with unnatural amino acids on the surface of the protein enables functional analysis of the protein, e.g., probing of protein structure-function correlation and interaction with other proteins.

TABLE 2
Examples of codon changes

| Target codon | Base-editing process | Edited codon |
|---|---|---|
| CAG (Gln/Q) | 1^{st} base C to T on coding strand | TAG (amber) |
| TGG (Trp/W) | 2^{nd} base C to T on complementary | TAG (amber) |
| | strand | |
| CGA (Arg/R) | 1^{st} base C to T on coding strand | TGA (opal) |
| CAA (Gln/Q) | 1^{st} base C to T on coding strand | TAA (ochre) |
| TGG (Trp/W) | 3^{rd} base C to T on complementary strand | TGA (opal) |
| CGG (Arg/R) | 1^{st} base C to T on coding strand and 2^{nd} | TAG (amber) |
| | base C to T on complementary strand | |
| CGA (Arg/R) | 1^{st} base C to T on coding strand and 2^{nd} | TAA (orchre) |
| | base C to T on complementary strand | |
| TGA (opal) | 2^{nd} base C to T on complementary | TAA (ochre) |
| | strand | |
| TAG (amber) | 3^{rd} base C to T on complementary strand | TAA (ochre) |
| GGG (Gly/G) | 1^{st} base C to T on complementary strand | AGG (rare Arg/R) |
| ATG (Met/M) | 3^{rd} base C to T on complementary strand | ATA (rare Ile/I) |
| GGT (Gly/G) | 1^{st} base C to T on complementary strand | AGT (rare Ser/S) |
| ACA (Thr/T) | 2^{nd} base C to T on coding strand | ATA (rare Ile/I) |
| CTC (Leu/L) | 1^{st} base C to T on coding strand | TTC (rare Phe/F) |
| TCT (Ser/S) | 2^{nd} base C to T on coding strand | TTT (rare Phe/F) |
| TCC (Ser/S) | 2^{nd} base C to T on coding strand | TTC (rare Phe/F) |
| CTT (Leu/L) | 1^{st} base C to T on coding strand | TTT (rare Phe/F) |
| CTC (Leu/L) | 1^{st} base C to T on coding strand and 3^{rd} | TTT (rare Phe/F) |
| | base C to T on coding strand | |
| TCC (Ser/S) | 2^{nd} base C to T on coding strand and 3^{rd} | TTT (rare Phe/F) |
| | base C to T on coding strand | |
| GGC (Gly/G) | 1^{st} base C to T on complementary strand | AGT (rare Ser/S) |
| | and 3^{rd} base C to T on coding strand | |
| GCA (Ala/A) | 1^{st} base C to T on complementary strand | ATA (rare Ile/I) |
| | and 2^{nd} base C to T on coding strand | |

* single underline: changes on the coding stranded
double underline: changes on the complementary strand

[0103] It is to be understood that other types of based editors that covert other bases (e.g., A to G) may be used. Base editors that can convert an adenosine to a guanine are described in U.S. Provisional Application Nos. 62/370,684; 62/454,035; 62/473,714; and PCT Application No. PCT/US2017/045381, incorporated herein by reference.

### Incorporation of Unnatural Amino Acids Via Nonsense Suppression or Rare Codon Suppression

[0104] To incorporate unnatural amino acids at the nonsense codon or rare codon introduced by the base editors, a translation system is designed to enable the decoding of the stop codon or the rare codon and the incorporation of the unnatural amino acids without interfering with the translation of the rest of the protein. Such translation systems have been described and used in the art, for example, in Edwards et al., Molecular and Cellular Biology, 1990; Edwards et al., PNAS 1991; Kiga et al., PNAS, 2002; Dumas et al., Cell, 2015; Liu et al., PNAS, 1997; Wang et al., Annu. Rev. Biophys. Biomol. Struct., 2006, Bholke et al., FEMS Microbiol. Lett., 2014, 351, 133; Bock et al., Mol. Microbiol., 1991, 5, 515; Johansson et al., Biochim. Biophys. Acta, 2005, 1726, 1; Takimoto et al., ACS Chem Biol. 2011 Jul. 15; 6(7):733-43; Stadtman et al., Annu Rev Biochem. 1996; 65:83-100; Ma et al., Biochemistry, 32:7939 (1993); Kowal et al., Nucl. Acid. Res., 25:4685 (1997); US Patent Application Publication US 2003/0108885; PCT Application Publication WO 2002/085923; and PCT Application Publication WO 2005/019415 the entire contents of each of which are incorporated herein by reference.

[0105] Components of a translation system can include, e.g., ribosomes, tRNAs, synthetases, mRNAs, and the like. The components of the present disclosure can be added to a translation system in vivo or in vitro. In some embodiments, the translation system comprises an orthogonal tRNA (OtRNA) and an orthogonal aminoacyl tRNA synthetase (ORS). Typically, the ORS preferentially aminoacylates the OtRNA with at least one unnatural amino acid in the translation system, and the OtRNA recognizes at least one nonsense or rare codon. The translation system thus inserts the unnatural amino acid into a protein produced in the system at an encoded nonsense codon or rare codon. Typical translation systems include cells, such as bacterial cells (e.g., Escherichia coli), archeaebacterial cells, eukaryotic cells (e.g., yeast cells, mammalian cells, plant cells, insect cells), or the like.

[0106] Translation systems may be cellular or cell-free, and may be prokaryotic or eukaryotic. Cellular translation systems include, but are not limited to, whole cell preparations such as permeabilized cells or cell cultures wherein a desired nucleic acid sequence can be transcribed to mRNA, and the mRNA translated. Cell-free translation systems are commercially available and many different types and systems are known. Examples of cell-free systems include, but are not limited to, prokaryotic lysates such as Escherichia coli lysates, and eukaryotic lysates such as wheat germ extracts, insect cell lysates, rabbit reticulocyte lysates, rabbit oocyte lysates, and human cell lysates. Eukaryotic extracts or lysates may be preferred when the resulting protein is glycosylated, phosphorylated, or otherwise modified because many such modifications are only possible in eukaryotic systems. Some of these extracts and lysates are available commercially (Promega; Madison, Wis.; Stratagene; La Jolla, Calif.; Amersham; Arlington Heights, Ill.; GIBCO/BRL; Grand Island, N.Y.). Membranous extracts, such as the canine pancreatic extracts containing microsomal membranes, are also available which are useful for translating secretory proteins.

[0107] Reconstituted translation systems may also be used. Mixtures of purified translation factors have also been used successfully to translate mRNA into protein as well as combinations of lysates or lysates supplemented with purified translation factors such as initiation factor-1 (IF-1), IF-2, IF-3 (α or β), elongation factor T (EF-Tu), or termination factors. Cell-free systems may also be coupled transcription/translation systems wherein DNA is introduced into the system, transcribed into mRNA, and the mRNA translated as described in Current Protocols in Molecular Biology (F. M. Ausubel et al. editors, Wiley Interscience, 1993), the entire contents of which is incorporated herein by reference. RNA transcribed in a eukaryotic transcription system may be in the form of heteronuclear RNA (hnRNA) or 5′-end caps (7-methyl guanosine) and 3′-end poly A tailed mature mRNA, which can be an advantage in certain translation systems. For example, capped mRNAs are translated with high efficiency in the reticulocyte lysate system.

[0108] In some embodiments, the translation system comprises RNA polymerases, translation initiation factor, ribosomes, release factor-1, release factor-2, release factor-3, ATPs, GTPs, CTPs, UTPs, elongation factor-Tu, natural aminoacyl-tRNA synthetases, natural tRNAs, and/or natural amino acids. In some embodiments, the translation system further comprises components for transcription, e.g., a T7 RNA polymerase. In vitro translation systems are commercially available, e.g., from Termo Fisher Scientific or New England Biolabs.

[0109] A variety of exemplary translation systems are useful in the present disclosure, including e.g., an Escherichia coli cell comprising a mtRNACUA Tyr and a mutant TyrRS (LWJ16), where the mutant TyrRS (LWJ16) preferentially aminoacylates the mtRNACUA Tyr with O-methyl-L-tyrosine in the cell, and the cell uses the mtRNACUA Tyr to recognize an amber codon. In another example, an Escherichia coli cell comprising a mtRNACUA Tyr and an SS12-TyrRS is provided, where the SS 12-TyrRS preferentially aminoacylates the mtRNACUa Tyr with L-3-(2-naphthyl)alanine in the cell, and the cell uses the mtRNACUA Tyr to recognize an amber codon.

[0110] In some embodiments, the success of the technology described herein depends on the recognition of the unnatural amino acid by aminoacyl-tRNA synthetases, which, in general, requires high selectivity to insure fidelity of protein translation. For instance, although thiaproline can be incorporated quantitatively into proteins, oxaproline and selenoproline cannot. See N. Budisa, C. Minks, F. J. Medrano, J. Lutz, R. Huber and L. Moroder, Proc. Natl. Acad. Sci. USA, 95:455 (1998). One way to expand the scope of this method is to relax the substrate specificity of aminoacyl-tRNA synthetases, which has been achieved in a limited number of cases. For example, it was found that replacement of Ala294 by Gly in Escherichia coli phenylalanyl-tRNA synthetase (PheRS) increases the size of the substrate binding pocket and results in the acylation of tRNAPhe by p-Cl-phenylalanine (p-Cl-Phe). See, M. Ibba, P. Kast and H. Hennecke, Biochemistry, 33:7107 (1994). An Escherichia coli strain harboring this mutant PheRS allows the incorporation of p-Cl-phenylalanine or p-Br-phenylalanine in place of phenylalanine. See, e.g., M. Ibba and H. Hennecke, FEBS Lett., 364:272 (1995); and, N. Sharma, R. Furter, P. Kast and D. A. Tirrell, FEBS Lett., 467:37 (2000). Similarly, a point mutation Phe130Ser near the amino acid binding site of Escherichia coli tyrosyl-tRNA synthetase was shown to allow azatyrosine to be incorporated more efficiently than tyrosine. See F. Hamano-Takaku, T. Iwama, S. Saito-Yano, K. Takaku, Y. Monden, M. Kitabatake, D. Soll and S. Nishimura, J. Biol. Chem., 275:40324 (2000).

[0111] The fidelity of aminoacylation is maintained both at the level of substrate discrimination and proofreading of non-cognate intermediates and products. Therefore, an alternative strategy to incorporate unnatural amino acids into proteins in vivo is to modify synthetases that have proofreading mechanisms. These synthetases cannot discriminate and therefore activate amino acids that are structurally similar to the cognate natural amino acids. This error is corrected at a separate site, which deacylates the mischarged amino acid from the tRNA to maintain the fidelity of protein translation. If the proof-reading activity of the synthetase is disabled, structural analogs that are misactivated may escape the editing function and be incorporated. This approach has been demonstrated recently with the valyl-tRNA synthetase (ValRS). ValRS can misaminoacylate tRNAVal with Cys, Thr, or aminobutyrate (Abu); these noncognate amino acids are subsequently hydrolyzed by the editing domain. After random mutagenesis of the Escherichia coli chromosome, a mutant Escherichia coli strain was selected that has a mutation in the editing site of ValRS. This edit-defective ValRS incorrectly charges tRNAVal with Cys. Because Abu sterically resembles Cys (—SH group of Cys is replaced with —CH₃ in Abu), the mutant ValRS also incorporates Abu into proteins when this mutant Escherichia coli strain is grown in the presence of Abu. Mass spectrometric analysis shows that about 24% of valines are replaced by Abu at each valine position in the native protein. See V. Doring, H. D. Mootz, L. A. Nangle, T. L. Hendrickson, V. de Crecy-Lagard, P. Schimmel and P. Marliere, Science, 292:501 (2001), the entire contents of which is incorporated herein by reference.

[0112] In some embodiments, OtRNA and ORS pairs are provided, e.g., where the OtRNA and the ORS are complementary. In some embodiments, an OtRNA and ORS pair comprises e.g., a mutRNATyr-mutTyrRS pair, such as mutRNATyr-SS12TyrRS pair, a mutRNALeu-mutLeuRS pair, a mutRNAThr-mutThrRS pair, a mutRNAGlu-mutGluRS pair, or the like. In some embodiments, the pair is other than a mutRNAGln-mutGlnRS derived from Escherichia coli, a mutRNAAsp-mutAspRS derived from yeast or a mutRNAPheCUA-mutphenlalanineRS from yeast.

[0113] In some embodiments, the OtRNA and the ORS can be derived by mutation of a naturally occurring tRNA and RS from a variety of organisms. In some embodiments, the OtRNA and ORS are derived from a prokaryotic organism, e.g., Methanococcus jannaschii, Methanobacterium thermoautotrophicum, Halobacterium, Escherichia coli, A. fulgidus, P. furiosus, P. horikoshii, A. pernix, T. thermophilus, or the like. The organism may also be a eukaryotic organism, e.g., plants (e.g., complex plants such as monocots, or dicots), algea, fungi (e.g., yeast, etc.), animals (e.g., mammals, insects, arthropods, etc.), insects, protists, or the like. Optionally, the OtRNA is created by mutation of a naturally occurring tRNA from a first organism, and the ORS is created by mutation of a naturally occurring RS from a second organism. In one embodiment, the OtRNA and ORS are derived from a mutated tRNA and mutated RS.

[0114] In some embodiments, the OtRNA and/or the ORS are isolated from a variety of organisms. In some embodiments, the OtRNA and/or ORS are isolated from at least one organism, where the organism is a prokaryotic organism, e.g., Methanococcus jannaschii, Methanobacterium thermoautotrophicum, Halobacterium, Escherichia coli, A. fulgidus, P. furiosus, P. horikoshii, A. pernix, T. thermophilus, or the like. In other embodiments, the organism is a eukaryotic organism, e.g., plants (e.g., complex plants such as monocots, or dicots), algea, fungi (e.g., yeast, etc), animals (e.g., mammals, insects, arthropods, etc.), insects, protists, or the like. Optionally, the OtRNA is isolated from a naturally occurring tRNA from a first organism, and the ORS is isolated from a naturally occurring RS from a second organism.

[0115] OtRNAs that may be used in accordance with the present disclosure may be a naturally occurring tRNA, or a modified tRNA. For example, OtRNAs may be derived from Tyr-tRNA, Glu-tRNA, Trp-tRNA, Leu-tRNA, Pyl-tRNA, amber-tRNA, etc. In some embodiments, the OtRNA is derived from a Tyr-tRNA of a Methanococcus jannaschii cell, referred to herein as mtRNA TyrA. In another embodiment, the OtRNA comprises a nucleic acid sequence of any one of SEQ ID NOs: 5-7, or a complementary polynucleotide sequence thereof. In some embodiments, the OtRNA comprises a nucleic acid sequence that is at least 85% identical to any one of SEQ ID NOs: 5-7. For example, the OtRNA may comprise a nucleic acid sequence that is at least 85%, at least 86%, at least 87%, at least 88%, at least 89%, at least 90%, at least 91%, at least 92%, at least 93%, at least 94%, at least 95%, at least 96%, at least 97%, at least 98%, at least 99%, or at least 99.9% identical to any one of SEQ ID NOs: 5-7. In some embodiments, the OtRNA comprises a nucleic acid sequence that is 85%, 86%, 87%, 88%, 89%, 90%, 91%, 92%, 93%, 94%, 95%, 96%, 97%, 985, 99%, or 99.9% identical to any one of SEQ ID NOs: 5-7. In some embodiments, the OtRNA consists of the nucleic acid sequence of any one of SEQ ID NOs: 5-7.

[0116] In some embodiments, the ORS is derived from TyrRS from Methanococcus jannaschii. In some embodiment, the ORS is referred to herein as mutant TyrRS (LWJ16) or SS12-TyrRS. In some embodiments, the ORS comprises an amino acid sequence of any one of SEQ ID NO: 330-361 or a polypeptide encoded by a nucleic acid sequence selected from any one of SEQ ID NOs: 330-361 or a complementary polynucleotide sequence thereof. In some embodiments, the ORS comprises an amino acid sequence that is at least 85% identical to any one of SEQ ID NOs: 330-361. For example, the ORS may comprise an amino acid sequence that is at least 85%, at least 86%, at least 87%, at least 88%, at least 89%, at least 90%, at least 91%, at least 92%, at least 93%, at least 94%, at least 95%, at least 96%, at least 97%, at least 98%, at least 99%, or at least 99.9% identical to any one of SEQ ID NOs: 330-361. In some embodiments, the ORS comprises an amino acid sequence that is 85%, 86%, 87%, 88%, 89%, 90%, 91%, 92%, 93%, 94%, 95%, 96%, 97%, 985, 99%, or 99.9% identical to any one of SEQ ID NOs: 330-361. In some embodiments, the ORS consists of the amino acid sequence of any one of SEQ ID NOs: 330-361. Non-limiting, exemplary ORS and OtRNA sequences are provided in Table 3 in Example 2.

[0117] In some embodiments, the translation system of the present disclosure is an Escherichia coli cell comprising a mtRNACUA Tyr and a mutant TyrRS (LWJ16), wherein the mutant TyrRS (LWJ16) preferentially aminoacylates the mtRNACUA Tyr with O-methyl-L-tyrosine in the cell, and the cell uses the mtRNACUA Tyr to recognize an amber codon.

[0118] In some embodiments, the translation system of the present disclosure is an Escherichia coli cell comprising a mtRNACUA Tyr and an SS12-TyrRS, wherein the SS12-TyrRS preferentially aminoacylates the mtRNACUA Tyr with L-3-(2-naphthyl)alanine in the cell, and the cell uses the mtRNACUA Tyr to recognize an amber codon.

[0119] The term “preferentially aminoacylates” refers to an efficiency of, e.g., about 70% efficient, about 75% efficient, about 85% efficient, about 90% efficient, about 95% efficient, or about 99% or more efficient, at which an ORS aminoacylates an OtRNA with an unnatural amino acid compared to a naturally occurring tRNA or starting material used to generate the OtRNA. The unnatural amino acid is then incorporated into a growing polypeptide chain with high fidelity, e.g., at greater than about 75% efficiency for a given nonsense codon or rare codon, at greater than about 80% efficiency for a given nonsense codon or rare codon, at greater than about 90% efficiency for a given nonsense codon or rare codon, at greater than about 95% efficiency for a given nonsense codon or rare codon, or at greater than about 99% or more efficiency for a given nonsense codon or rare codon.

[0120] Using the compositions and methods provided herein, in some embodiments, more than one type of unnatural amino acids (e.g., 1, 2, 3, 4, 5, 6, 7, 8, 9, 10, 11 12, 13, 14, 15 or more) may be incorporated. For the sole purpose of illustration, in one example, two different types of unnatural amino acids (e.g., O-methyl-L-tyrosine and L-3-(2-naphthyl)alanine) may be incorporated by providing the cell with two pairs of OtRNA and ORS pairs, each ORS preferentially aminoacylates the OtRNA with one of the two unnatural amino acids, and each OtRNA preferentially decodes one edited codon (e.g., a nonsense codon or a rare codon). Thus, at least two different types of edited codons are introduced to the cell. In some embodiments, the two different edited codons decoded by the two OtRNAs are introduced into one protein, thereby incorporating two different types of unnatural amino acids into one protein. In some embodiments, the two different edited codons recognized by the two OtRNAs are introduced into two proteins, thereby incorporating one type of unnatural amino acid into one protein and the other type of unnatural amino acid into the other protein. Thus, it is also contemplated herein that, in some embodiments, different types of unnatural amino acids are incorporated into one or more proteins (e.g., 1, 2, 3, 4, 5, 6, 7, 8, 9, 10, 11 12, 13, 14, 15 or more proteins). Where the unnatural amino acids are incorporated are determined by where the nonsense codon or rare codon is introduced in a protein, which is in turn determined by the guide nucleotide sequence.

[0121] In some embodiments, the unnatural amino acids are incorporated proteome-wide (e.g., proteome-wide incorporation of one type of unnatural amino acid, or proteome-wide incorporation of 2, 3, 4, 5, 6, 7, 8, 9, 10, 11 12, 13, 14, 15 or more types of unnatural amino acids). Proteome-wide incorporation of unnatural amino acids is enabled by the versatile nature of the RNA-programmable based editors described herein. By providing the base editors with a library of guide nucleotide sequences (e.g., 1, 2, 3, 4, 5, 6, 7, 8, 9, 10, 20, 30, 40, 50, 60, 70, 80, 90, 100, 200, 300, 400, 500, or more sgRNAs each targeting a different target codon), nonsense or rare codons may be introduced proteome-wide.

[0122] Non-limiting examples of unnatural amino acids that may be incorporated into proteins using the compositions and methods of the present disclosure include analogs or derivatives of natural amino acids. In some embodiments, the unnatural amino acid is selected from the group consisting of unnatural analogues of tyrosine, unnatural analogues of glutamine, unnatural analogues of phenylalanine, unnatural analogues of serine, unnatural analogues of threonine, unnatural analogues of alanine, unnatural analogues of cysteine, unnatural analogues of aspartic acid, unnatural analogues of glutamic acid, unnatural analogues of glycine, unnatural analogues of histidine, unnatural analogues of isoleucine, unnatural analogues of lysine, unnatural analogues of leucine, unnatural analogues of methionine, unnatural analogues of asparagine, unnatural analogues of proline, unnatural analogues of arginine, unnatural analogues of valine, and unnatural analogues of tryptophan. In some embodiments, the unnatural amino acid is selected from the group consisting of: O-methyl-L-tyrosine, L-3-(2-naphthyl)alanine, 3-methyl-phenylalanine, O-4-allyl-L-tyrosine, 4-propyl-L-tyrosine, tri-O-acetyl-GlcNAcβ-serine, L-dopa, fluorinated phenylalanine, isopropyl-L-phenylalanine, p-azido-L-phenylalanine, p-acyl-L-phenylalanine, p-benzoyl-L-phenylalanine, L-phosphoserine, phosphonoserine, phosphonotyrosine, p-iodo-phenylalanine, p-bromophenylalanine, p-amino-L-phenylalanine, and isopropyl-L-phenylalanine. In some embodiments, the unnatural amino acid is selected from the group consisting of: alkyl, aryl, acyl, azido, cyano, halo, hydrazine, hydrazide, hydroxyl, alkenyl, alkynl, ether, thiol, sulfonyl, seleno, ester, thioacid, borate, boronate, phospho, phosphono, phosphine, heterocyclic, enone, imine, aldehyde, hydroxylamine, keto, and amino-substituted amino acids, and any combinations thereof. In some embodiments, the unnatural amino acid is selected from the group consisting of amino acids with a photoactivatable cross-linker; spin-labeled amino acids; fluorescent amino acids; amino acids with a novel functional group; amino acids that covalently or noncovalently interacts with another molecule; metal binding amino acids; metal-containing amino acids; radioactive amino acids; photocaged and/or photoisomerizable amino acids; biotin or biotin-analogue containing amino acids; glycosylated or carbohydrate modified amino acids; keto containing amino acids; amino acids comprising polyethylene glycol or polyether; heavy atom substituted amino acids; chemically cleavable or photocleavable amino acids; amino acids with an elongated side chain; amino acids containing a toxic group; sugar substituted amino acids; carbon-linked sugar-containing amino acids; redox-active amino acid; α-hydroxy-containing acids; amino thio acid containing amino acid; α,α di-substituted amino acids; β-amino acids; and cyclic amino acids other than proline. In some embodiments, the unnatural amino acid is any unnatural amino acid described in FIG. 3.

[0123] The incorporation of unnatural amino acid into a protein may be in vivo or in vitro. In in vitro incorporation, in some embodiments, the unnatural amino acid may be supplied as a component of the translation system. In some embodiments, the unnatural amino acid may be added or supplemented to the translation system as an independent component. In in vivo incorporation (e.g., in a culture cell such as Hela), the unnatural amino acid may be supplemented into the media of a cultured cell. In some embodiments, biosynthetic pathways that can synthesize the unnatural amino acids may be engineered into the cell (e.g., integrated into the genomic DNA of the cell, or provided via any recombinant DNA technique for expression of exogenous proteins, e.g., AVAL or lentiviral vectors). Such biosynthetic pathways are described in US Patent Application Publication, US 20030082575, the entire contents of which is incorporated herein by reference.

[0124] When the unnatural amino acid is supplied in the media of a cultured cell, the cell needs to uptake the unnatural amino acid before it can be incorporated into a protein. Unnatural amino acid uptake is one issue that is typically considered when designing and selecting unnatural amino acids, e.g., for incorporation into a protein. For example, the high charge density of α-amino acids suggests that these compounds are unlikely to be cell permeable. Natural amino acids are taken up into bacteria via a collection of protein-based transport systems displaying varying degrees of amino acid specificity. Methods of biosynthesizing or uptaking an unnatural amino acid are described in US Patent Application Publication, US 20030082575, the entire contents of which are incorporated herein by reference.

[0125] Further provided herein are general methods for delivering unnatural amino acids, which is independent of all amino acid uptake pathways. This general method relies on uptake via peptide permeases, which transport dipeptides and tripeptides across the cytoplasmic membrane. Peptide permeases are not very side-chain specific, and the K_{D} values for their substrates are comparable to K_{D} values of amino acid permeases, e.g., about 0.1 mM to about 10 mM). See, e.g., Nickitenko et al., Biochemistry 34, 16585-16595 (1995) and Dunten et al., Protein Science 4, 2327-34 (1995). The unnatural amino acids are then taken up as conjugates of natural amino acids, such as lysine, and released into the cytoplasm upon hydrolysis of the dipeptide by one of endogenous Escherichia coli peptidases.

[0126] The methods described herein provide the ability to synthesize proteins that comprise unnatural amino acids in useful quantities. For example, proteins comprising at least one unnatural amino acid can be produced at a concentration of at least about 10, 50, 100, or more micrograms per liter, e.g., in a composition comprising a cell extract, a buffer, a pharmaceutically acceptable excipient, and/or the like.

[0127] When an unnatural amino acid is incorporated into a newly synthesized protein, a protein comprising the unnatural amino acid is produced. Accordingly, other aspects of the present disclosure provide for the production of proteins. Virtually any protein in the cell may be made using the methods described herein. In some embodiments, proteins that are homologous to any available protein but including one or more unnatural amino acids are made. Thus, non-limiting examples of proteins, or homologous thereof, that may be synthesized using the methods and systems described herein, include: alpha-1 antitrypsin, angiostatin, antihemolytic factor, antibodies, apolipoprotein, apoprotein, atrial natriuretic factors, atrial natriuretic polypeptide, atrial peptides, C—X—C chemokine, T39765, NAP-2, ENA-78, Gro-a, Gro-b, Gro-c, IP-10, GCP-2, NAP-4, SDF-1, PF4, MIG, calcitonin, c-kit ligand, cytokines, CC chemokines, monocyte chemoattractant protein-1, monocyte chemoattractant protein-2, monocyte chemoattractant protein-3, monocyte inflammatory protein-1 alpha, monocyte inflammatory protein-i beta, RANTES, 1309, R83915, R91733, HCC1, T58847, D31065, T64262, CD40, CD40 ligand, hyalurin/CD44, C-kit Ligand, collagen, colony stimulating factor (CSF), complement factor 5a, complement inhibitor, complement receptor 1, cytokine, epithelial neutrophil activating peptide-78, GROα/MGSA, GROβ, GROγ, MIP-1α, MIP-16, MCP-1, epidermal growth factor (EGF), epithelial neutrophil activating peptide, erythropoietin (EPO), transcriptional activators, transcriptional suppressors, exfoliating toxin, factor IX, factor VII, factor VIII, factor X, fibroblast growth factor (FGF), fibrinogen, fibronectin, G-CSF, GM-CSF, glucocerebrosidase, gonadotropin, growth factors, growth factor receptors, hedgehog protein, hemoglobin, hepatocyte growth factor (HGF), signal transduction molecules, Hirudin, human serum albumin, ICAM-1, ICAM-1 receptors, LFA-1, LFA-1 receptors, insulin, insulin-like growth factors (IGF), IGF-I, IGF-II, interferons, IFN-α, IFN-β, IFN-γ, interleukin, IL-1, IL-2, IL-3, IL-4, IL-5, IL-6, IL-7, IL-8, IL-9, IL-10, IL-11, IL-12, keratinocyte growth factor (KGF), lactoferrin, leukemia inhibitory factor, luciferase, neurturin, neutrophil inhibitory factors (NIF), oncostatin M, osteogenic proteins, oncogene products, parathyroid hormone, PD-ECSF, PDGF, peptide hormones, human growth hormone, pleiotropin, protein A, protein G, pyrogenic exotoxins A, B, or C, relaxin, renin, SCF, soluble complement receptor I, soluble I-CAM 1, soluble interleukin receptors, TNF, soluble TNF receptors, somatomedin, somatostatin, somatotropin, streptokinase, superantigens, staphylococcal enterotoxins, SEA, SEB, SEC1, SEC2, SEC3, SED, SEE, steroid hormone receptors, superoxide dismutase, toxic shock syndrome toxins, thymosin alpha 1, tissue plasminogen activators, tumor growth factors (TGF), TGF-α, TGF-β, tumor necrosis factors, tumor necrosis factor alpha, tumor necrosis factor beta, tumor necrosis factor receptor (TNFR), VLA-4 proteins, VCAM-1 protein, vascular endothelial growth factor (VEGEF), urokinase, Mos, Ras, Raf, Met, p53, Tat, Fos, Myc, Jun, Myb, Rel, estrogen receptors, progesterone receptors, testosterone receptors, aldosterone receptors, LDL receptors, BRD4, PRSS2, and fragments thereof. In some embodiments, the protein is BRD4. In some embodiments, the protein is PRSS2. The proteins produced herein that contain the unnatural amino acid sequence may in some embodiments be used for research purposes. In other embodiments, the protein may be a therapeutic protein that may be used for therapeutic purpose. Thus, also contemplated herein are compositions comprising a protein comprising an unnatural amino acid and a pharmaceutically acceptable excipient, e.g., any of the proteins noted above and a pharmaceutically acceptable excipient.

[0128] Homology to the polypeptide can be inferred by performing a sequence alignment, e.g., using BLASTN or BLASTP, e.g., set to default parameters. For example, in one embodiment, the protein is at least about 50%, at least about 75%, at least about 80%, at least about 90%, or at least about 95% identical to a known therapeutic protein (e.g., a protein present in Genebank or other databases.

[0129] The protein synthesized as described herein may contain 1, 2, 3, 4, 5, 6, 7, 6, 9, 10, 11, 12, 13, 14, 15, or more unnatural amino acids. The unnatural amino acids can be the same or different, e.g., there can be 1, 2, 3, 4, 5, 6, 7, 6, 9, 10, 11, 12, 13, 14, 15, or more different sites in the protein wherein unnatural amino acids are incorporated, and the protein may comprise 1, 2, 3, 4, 5, 6, 7, 6, 9, 10, 11, 12, 13, 14, 15, or more different types of unnatural amino acids.

[0130] The proteins, e.g., polypeptides, peptides, etc., of the present disclosure (e.g., comprising one or more unnatural amino acid) may be employed for therapeutic uses, e.g., in combination with a suitable pharmaceutical carrier. Such compositions, e.g., comprise a therapeutically effective amount of the compound and a pharmaceutically acceptable carrier or excipient. Such a carrier or excipient includes, but is not limited to, saline, buffered saline, dextrose, water, glycerol, ethanol, and/or combinations thereof. The formulation is made to suit the mode of administration. In general, methods of administering proteins are well known in the art and can be applied to administration of the polypeptides of the disclosure.

[0131] Therapeutic compositions comprising one or more polypeptide of the present disclosure are optionally tested in one or more appropriate in vitro and/or in vivo animal models of disease, to confirm efficacy, tissue metabolism, and to estimate dosages, according to methods well known in the art. In particular, dosages can be initially determined by activity, stability, or other suitable measures of unnatural herein to natural amino acid homologues (e.g., comparison of an EPO modified to include one or more unnatural amino acids to a natural amino acid EPO), i.e., in a relevant assay.

[0132] Administration is by any of the routes normally used for introducing a molecule into ultimate contact with blood or tissue cells. The unnatural amino acid polypeptides of the present disclosure are administered in any suitable manner, optionally with one or more pharmaceutically acceptable carriers. Suitable methods of administering such polypeptides in the context of the present disclosure to a patient are available, and, although more than one route can be used to administer a particular composition, a particular route can often provide a more immediate and more effective action or reaction than another route.

[0133] Pharmaceutically acceptable carriers are determined in part by the particular composition being administered, as well as by the particular method used to administer the composition. Accordingly, there is a wide variety of suitable formulations of pharmaceutical compositions of the present disclosure.

[0134] Polypeptide compositions can be administered by a number of routes including, but not limited to: oral, intravenous, intraperitoneal, intramuscular, transdermal, subcutaneous, topical, sublingual, or rectal means. Unnatural amino acid polypeptide compositions can also be administered via liposomes. Such administration routes and appropriate formulations are generally known to those of skill in the art.

[0135] The unnatural amino acid polypeptide, alone or in combination with other suitable components, can also be made into aerosol formulations (i.e., they can be “nebulized”) to be administered via inhalation. Aerosol formulations can be placed into pressurized acceptable propellants, such as dichlorodifluoromethane, propane, nitrogen, and the like.

[0136] Formulations suitable for parenteral administration, such as, for example, by intraarticular (in the joints), intravenous, intramuscular, intradermal, intraperitoneal, and subcutaneous routes, include aqueous and non-aqueous, isotonic sterile injection solutions, which can contain antioxidants, buffers, bacteriostats, and solutes that render the formulation isotonic with the blood of the intended recipient, and aqueous and non-aqueous sterile suspensions that can include suspending agents, solubilizers, thickening agents, stabilizers, and preservatives. The formulations of packaged nucleic acid can be presented in unit-dose or multi-dose sealed containers, such as ampules and vials.

[0137] Parenteral administration and intravenous administration are preferred methods of administration. In particular, the routes of administration already in use for natural amino acid homologue therapeutics (e.g., those typically used for EPO, GCSF, GMCSF, IFNs, interleukins, antibodies, and/or any other pharmaceutically delivered protein), along with formulations in current use, provide preferred routes of administration and formulation for the unnatural amino acids of the disclosure.

[0138] The dose administered to a patient, in the context of the present disclosure, is sufficient to effect a beneficial therapeutic response in the patient over time, or, e.g., to inhibit infection by a pathogen, or other appropriate activity, depending on the application. The dose is determined by the efficacy of the particular vector, or formulation, and the activity, stability, or serum half-life of the unnatural amino acid polypeptide employed and the condition of the patient, as well as the body weight or surface area of the patient to be treated. The size of the dose is also determined by the existence, nature, and extent of any adverse side-effects that accompany the administration of a particular vector, formulation, or the like in a particular patient.

[0139] In determining the effective amount of the vector or formulation to be administered in the treatment or prophylaxis of disease (e.g., cancers, inherited diseases, diabetes, AIDS, or the like), the physician evaluates circulating plasma levels, formulation toxicities, progression of the disease, and/or where relevant, the production of anti-unnatural amino acid polypeptide antibodies.

### Applications

[0140] The ability to study cellular systems and the mechanisms that drive disease-relevant and fundamental biological processes relies on a suite of chemical and genetic perturbagens to interrogate these complex systems in situ using experimental paradigms as cloase to the native state as possible. Described herein are compositions and methods that enable high-throughput incorporation of unnatural amino acids into proteins in a living cell, allowing proteome-wide interrogation and profiling of protein structures and functions. Thus, other aspects of the present disclosure provide applications that are enabled by the technology described herein.

[0141] For example, the unnatural amino acid incorporated into a protein may contain functionalized chemical moieties. A “functionalized chemical moiety” or a “functional group,” or a “reactive chemical group/handle” refers to specific groups (moieties) of atoms or bonds within molecules that are responsible for the characteristic chemical reactions of those molecules. These terms are used interchangeably herein. One example of such functionalized chemical moiety is a “click chemistry handle.” Click chemistry is a chemical approach introduced by Sharpless in 2001 and describes chemistry tailored to generate substances quickly and reliably by joining small units together. See, e.g., Kolb, Finn and Sharpless Angewandte Chemie International Edition (2001) 40: 2004-2021; Evans, Australian Journal of Chemistry (2007) 60: 384-395). Exemplary coupling reactions (some of which may be classified as “Click chemistry”) include, but are not limited to, formation of esters, thioesters, amides (e.g., such as peptide coupling) from activated acids or acyl halides; nucleophilic displacement reactions (e.g., such as nucleophilic displacement of a halide or ring opening of strained ring systems); azide-alkyne Huisgon cycloaddition; thiol-yne addition; imine formation; and Michael additions (e.g., maleimide addition). A “click chemistry handle” refers to a functional group that is able to undergo a click chemistry coupling reaction. Non-limiting examples of a click chemistry handle include an azide handle, an alkyne handle, or an aziridine handle. Azide is the anion with the formula N³⁻. It is the conjugate base of hydrazoic acid (HN3). N³⁻ is a linear anion that is isoelectronic with CO₂, NCO−, N₂O, NO²⁺ and NCF. Azide can be described by several resonance structures, an important one being ⁻N═N⁺═N⁻. An alkyne is an unsaturated hydrocarbon containing at least one carbon-carbon triple bond. The simplest acyclic alkynes with only one triple bond and no other functional groups form a homologous series with the general chemical formula CₙH₂ₙ₋₂. Alkynes are traditionally known as acetylenes, although the name acetylene also refers specifically to C₂H₂, known formally as ethyne using IUPAC nomenclature. Like other hydrocarbons, alkynes are generally hydrophobic but tend to be more reactive. Aziridines are organic compounds containing the aziridine functional group, a three-membered heterocycle with one amine group (—NH—) and two methylene bridges (—CH2-). The parent compound is aziridine (or ethylene imine), with molecular formula C₂H₅N.

[0142] Probes containing reactive chemical groups that can react with azide handles may be synthesized. A “probe,” as used herein, is a reagent that allow the user to probe into mechanistic and phenotypic questions about their molecular targets, e.g., a protein. Non-limiting examples of the reactive chemical groups that may be used as a probe in the present disclosure include: azide, alkyne, aziridine, norbornene, triazine, cyclooctyne, and dibenzocyclooctyne. In some embodiments, an alkyne probe may be synthesized as described in published PCT application, WO 2013/152359, the entire contents of which is incorporated herein by reference.

[0143] Unatural amino acids comprising these reactive chemical groups may be designed and synthesized (Dumas et al., Chemical Science, 6, 50-60, 2015, The entire contents of which is incorporated herein by reference). Non-limiting examples of functionalized unnatural amino acids are provided in FIG. 3. The incorporation of unnatural amino acids containing reactive chemical groups, e.g., click chemistry handles, into a protein enables the probing of protein structure and/or function in a wide range of applications. The ability of incorporating unnatural amino acids proteome-wide is the unique feature of the compositions and methods described herein, and is particularly advantageous. The ability to introduce orthogonal sets of suppressors allows the skilled artisan to study the interactions of complex protein networks simultaneously in a living cell. In some embodiments, multiple probes could be used to label multiple proteins in the same cell. In some embodiments, multiple proteins are endowed with different chemical functionalities. In some embodiments, altered protein-protein interactions, altered subcellular localization for another target, targeted degradation of a third target, and more cellular events, may be programmed simultaneously.

[0144] Accordingly, the present disclosure provides non-limiting examples of how the high-throughput and programmable incorporation of chemical functionalities into proteins can be applied to a variety of unbiased large-scale interrogation of proteins in its native cellular context.

[0145] In some embodiments, unnatural amino acids containing reactive chemical handles may be incorporated into proteins to study protein degradation. The ability to study protein degradation in a high-throughput and quantifiable manner has been difficult to do to date. Genome-wide genetic perturbation of all proteins using existing technologies (e.g., siRNA or CRISPR/Cas9) may not be well tolerated by cells when essential genes are modified. Currently, to study protein degradation, proteins of interest can be targeted for degradation if a small molecule ligand exists that binds to the target. This approach relies on ligand discovery, which can be time intensive and is inherently limited in throughput. An alternative strategy leads to protein degradation by tagging the target of interest with degradation-inducing tags. Such systems, like the auxin degradation system, could be generated using a number of different protein tags. However, these approaches are limited because there is no efficient way to introduce such a tag onto the protein of interest in a high throughput manner. Further, protein tagging may alter the native function of the protein.

[0146] Using the nucleobase editors and the guide nucleotide sequences (e.g., gRNAs) described herein, stop codons or rare codons can be introduced into the coding sequences of proteins proteome-wide, and suppression of the stop codons or rare codons using the translation system described herein can introduce chemical handles into proteins. In some embodiments, 0-17% of natural codons may be targeted. For example, 1%, 2%, 3%, 4%, 5%, 65, 7%, 8%, 9%, 10%, 11%, 12%, 13%, 14%, 15%, 16%, or 17% of natural codons may be targeted. In some embodiments, the targeted amino acids are polar amino acids, e.g., glutamine or arginine. In some embodiments, the targeted polar amino acids are on the surface of a protein and are readily accessible. In some embodiments, more than one amino acid (e.g., 2, 3, 4, 5, 6, 7, 8, 9, 10, 11, 12, 13, 14, 15, or more) are targeted in one protein. In some embodiments, unnatural amino acids are incorporated proteome-wide in a cell. Integration of chemical handles (e.g., click chemistry handles described herein) into multiple proteins or multiple tags within one protein at a time is desirable and is possible using the OtRNA-ORS pairs described herein.

[0147] In a non-limiting example, azide handles or other click chemistry handles described herein may be incorporated into proteins and used to conduct a proteome-wide degradation screen. For example, in the context of protein degradation, the probe may be a small molecule that targets the protein for degradation, e.g., by the proteasome. In some embodiments, the probe comprises a small molecule that targets the protein for degradation by the proteasome. Such small molecules are described in the art, e.g., thalidomide or pathalimide (Winter et al., Science, 348, 1376-1381, 2015, the entire contents of which are incorporated herein by reference), PROTACs (Bondeson et al., Nature Chemical Biology, 11, 611-617, 2015, the entire contents of which are incorporated herein by reference), and lenalidomide (Lu et al., Science, 343, 305-309, 2014; Krönke et al., Science, 17; 343(6168):301-5, 2014, the entire contents of each of which are incorporated herein by reference). In some embodiments, these small molecules target a protein for degradation by the proteasome via the recruitment of ubiquitin ligases. The probes may also include reactive chemical groups that react with the azide handles in the protein, e.g., alkyne handle. Methods and processes of synthesizing the probes are known to those skilled in the art, e.g., in Winter et al., Science, 348, 1376-1381, 2015, the entire contents of which are incorporated herein by reference. Non-limiting examples of how to synthesize probes for protein degradation are illustrated in FIG. 4. By generating an alkyne-tagged probe such as thalidomide, each protein in a cell could be directed to the proteasome via cereblon (CRBN)-dependent ubiquitination. The programmable proteome-wide degradation screen may be employed to study proteins where genetic perturbation leads to lethality to a cell, e.g., perturbation of essential genes. Such a screen can also be used to evaluate components of a complex where genetic knockout of important components leads to malfunctions and failures of the complex to assemble. Further, the screen can be used to identify drug targets in a high throughput and multiplex-able way. Multiple proteins can be degraded at once or complimentary activities can be encoded using this system where one protein is degraded while another is modified in another manner.

[0148] In some embodiments, the incorporation of azide, alkyne, or other click chemistry handles into a protein may enable the incorporation of signaling moieties into the protein. For example, localization signals can be attached to any and all proteins in the cell in a consistent manner to study the effects of localization on the entire proteome. As such, the localization signals are in the form of a localization probe, e.g., they may include reactive chemical groups that react with the reactive chemical handles in the protein.

[0149] A “localization signal,” as used herein, is a short (about 3-70 amino acids long) peptide chain that directs the transport of a protein to a specific region in the cell, including the nucleus, mitochondria, endoplasmic reticulum (ER), chloroplast, apoplast, peroxisome, periplasm and plasma membrane. In some embodiments, the localization signal is cleaved from the protein by signal peptidases after the proteins are transported. Typically, nuclear localization signal (NLS) contains one or more short sequences of positively charged lysines or arginines exposed on the protein surface. Non-limiting examples of NLS-probes that may be synthesized are illustrated in FIG. 6. See also, Wang et al., J. Control Release 2011 Oct. 10; 155(1):26-33, the entire contents of which is incorporated herein by reference. In some embodiments, a membrane localization signal is a “signal peptide” or a “leader peptide.” A signal peptide comprises a short (about 5-30 amino acids long) peptide present at the N-terminus of the majority of newly synthesized proteins that are destined towards the secretory pathway. In some embodiments, a membrane localization signal is a lipid moiety, e.g., a myristoyl moiety. Non-limiting examples of myristoyl probes that may be synthesized are illustrated in FIG. 5. The “mitochondrial localization signal” or “mitochondrial transport signal (MTS)” comprises a 10-70 amino acid long peptide that directs a newly synthesized proteins to the mitochondria. It is found at the N-terminus and consists of an alternating pattern of hydrophobic and positively charged amino acids to form what is called an amphipathic helix. An MTS can contain additional signals that subsequently target the protein to different regions of the mitochondria, such as the mitochondrial matrix. An MTS is cleaved once targeting is complete. Non-limiting examples of MTS-probes that may be synthesized are illustrated in FIG. 6. See also, Lin et al., Bioconjug Chem. 2015 Jan. 21; 26(1):71-7, the entire contents of which is incorporated herein by reference. In some embodiments, the localization signal of the present disclosure may be about 3-70 amino acids long. For example, the localization signal may be 3, 4, 5, 6, 7, 8, 9, 10, 11, 12, 13, 14, 15, 16, 17, 18, 19, 20, 21, 22, 23, 24, 25, 26, 27, 28, 29, 30, 31, 32, 33, 34, 35, 36, 37, 38, 39, 40, 41, 42, 43, 44, 45, 46, 47, 48, 49, 50, 51, 52, 53, 54, 55, 56, 56, 58, 59, 60, 61, 62, 63, 64, 65, 66, 67, 68, 69, 70, or more amino acids long.

[0150] In some embodiments, a variety of ligands can be appended to a protein using the click chemistry handles (e.g., azide handles) incorporated into the protein using the compositions and methods described herein, enabling the elucidation of the effects of such modification to the protein. The ligands that may be appended to a protein may be any of the known post-translational modifications, e.g., glycosylation, lipidation, phosphorylation, ubiquitination, acetylation, methylation, etc.

[0151] In some embodiments, a small molecule (e.g., a metabolite) is appended to a protein, which may be used to recruit various proteins and modifying enzymes to the protein. As such, protein complexes are formed and the formation of the complex and/or co-localization of proteins may be observed, or the protein complex may be isolated, e.g., by fluorescent labeling, or affinity tagging. In some embodiments, it is envisioned that one protein comprises unnatural amino acids containing, for example, an azide handle; and a second protein comprises a chemical moiety for labeling with a detection reagent, e.g., a fluorescent label. Chemical moieties that allow conjugation or attachment of a fluorescent label include, without limitation, a Halo-tag, a SNAP-tag, a CLIP tag, a FK-506 tag, and rapamycin. Those skilled in the art are familiar with the use of these tags for functional protein analysis. As illustrated in FIG. 7, a Halo-probe, and similarly a SNAP-probe or a CLIP-probe, for use in accordance with the presence disclosure may be synthesized. Using the methods described herein, protein-protein interactions, co-localization, trafficking, or other cellular events may be interrogated in a high throughput manner. In some embodiments, multiple cellular components may be interrogated simultaneous using multiple sets of OtRNA-ORS pairs.

[0152] In some embodiments, an aziridine handle is used to track protein complex formation. Amino acids containing an aziridine group bind adjacent protein surfaces in a covalent manner. Thus, integration of such tags into proteins could help discern direct protein contacts made between various proteins in a cell. In some embodiments, multiple sites per protein may be targeted for incorporation of unnatural amino acids to generate full coverage of the interactome. In some embodiments, the methods described herein may be integrated with small molecule screening platforms, RNAi screens, or CRIPSR gene knockout screening to identify small molecules that can perturb protein-protein interactions. In some embodiments, bulky residues that prevent protein binding, e.g., tryptophan, phenylalanine, can be used to identify interactions that drive biological phenomena.

[0153] The proteins, e.g., polypeptides, peptides, etc., of the present disclosure (e.g., comprising one or more unnatural amino acid) may be employed for therapeutic uses, e.g., in combination with a suitable pharmaceutical carrier. Such compositions, e.g., comprise a therapeutically effective amount of the compound and a pharmaceutically acceptable carrier or excipient. Such a carrier or excipient includes, but is not limited to, saline, buffered saline, dextrose, water, glycerol, ethanol, and/or combinations thereof. The formulation is made to suit the mode of administration. In general, methods of administering proteins are well known in the art and can be applied to administration of the polypeptides of the disclosure.

[0154] Therapeutic compositions comprising one or more polypeptide of the present disclosure are optionally tested in one or more appropriate in vitro and/or in vivo animal models of disease, to confirm efficacy, tissue metabolism, and to estimate dosages, according to methods well known in the art. In particular, dosages can be initially determined by activity, stability, or other suitable measures of unnatural herein to natural amino acid homologues (e.g., comparison of an EPO modified to include one or more unnatural amino acids to a natural amino acid EPO), i.e., in a relevant assay.

[0155] Administration is by any of the routes normally used for introducing a molecule into ultimate contact with blood or tissue cells. The unnatural amino acid polypeptides of the present disclosure are administered in any suitable manner, optionally with one or more pharmaceutically acceptable carriers. Suitable methods of administering such polypeptides in the context of the present disclosure to a patient are available, and, although more than one route can be used to administer a particular composition, a particular route can often provide a more immediate and more effective action or reaction than another route.

[0156] Pharmaceutically acceptable carriers are determined in part by the particular composition being administered, as well as by the particular method used to administer the composition. Accordingly, there is a wide variety of suitable formulations of pharmaceutical compositions of the present disclosure.

[0157] Polypeptide compositions can be administered by a number of routes including, but not limited to: oral, intravenous, intraperitoneal, intramuscular, transdermal, subcutaneous, topical, sublingual, or rectal means. Unnatural amino acid polypeptide compositions can also be administered via liposomes. Such administration routes and appropriate formulations are generally known to those of skill in the art.

[0158] The unnatural amino acid polypeptide, alone or in combination with other suitable components, can also be made into aerosol formulations (i.e., they can be “nebulized”) to be administered via inhalation. Aerosol formulations can be placed into pressurized acceptable propellants, such as dichlorodifluoromethane, propane, nitrogen, and the like.

[0159] Formulations suitable for parenteral administration, such as, for example, by intraarticular (in the joints), intravenous, intramuscular, intradermal, intraperitoneal, and subcutaneous routes, include aqueous and non-aqueous, isotonic sterile injection solutions, which can contain antioxidants, buffers, bacteriostats, and solutes that render the formulation isotonic with the blood of the intended recipient, and aqueous and non-aqueous sterile suspensions that can include suspending agents, solubilizers, thickening agents, stabilizers, and preservatives. The formulations of packaged nucleic acid can be presented in unit-dose or multi-dose sealed containers, such as ampules and vials.

[0160] Parenteral administration and intravenous administration are preferred methods of administration. In particular, the routes of administration already in use for natural amino acid homologue therapeutics (e.g., those typically used for EPO, GCSF, GMCSF, IFNs, interleukins, antibodies, and/or any other pharmaceutically delivered protein), along with formulations in current use, provide preferred routes of administration and formulation for the unnatural amino acids of the disclosure.

[0161] The dose administered to a patient, in the context of the present disclosure, is sufficient to effect a beneficial therapeutic response in the patient over time, or, e.g., to inhibit infection by a pathogen, or other appropriate activity, depending on the application. The dose is determined by the efficacy of the particular vector, or formulation, and the activity, stability, or serum half-life of the unnatural amino acid polypeptide employed and the condition of the patient, as well as the body weight or surface area of the patient to be treated. The size of the dose is also determined by the existence, nature, and extent of any adverse side-effects that accompany the administration of a particular vector, formulation, or the like in a particular patient.

[0162] In determining the effective amount of the vector or formulation to be administered in the treatment or prophylaxis of disease (e.g., cancers, inherited diseases, diabetes, AIDS, or the like), the physician evaluates circulating plasma levels, formulation toxicities, progression of the disease, and/or where relevant, the production of anti-unnatural amino acid polypeptide antibodies.

[0163] The dose administered, e.g., to a 70 kilogram patient are typically in the range equivalent to dosages of currently-used therapeutic proteins, adjusted for the altered activity or serum half-life of the relevant composition. The vectors of the present disclosure can supplement treatment conditions by any known conventional therapy, including antibody administration, vaccine administration, administration of cytotoxic agents, natural amino acid polypeptides, nucleic acids, nucleotide analogues, biologic response modifiers, and the like.

### Nucleobase Editors

[0164] The methods of incorporating unnatural amino acids into a protein described herein, are enabled by the use of the nucleobase editors. As described herein, a nucleobase editor is a fusion protein comprising: (i) a programmable DNA binding protein domain; and (ii) a deaminase domain. It is to be understood that any programmable DNA binding domain may be used in the based editors of the present disclosure.

[0165] In some embodiments, the programmable DNA binding protein domain comprises the DNA binding domain of a zinc finger nuclease (ZFN) or a transcription activator-like effector domain (TALE). In some embodiments, the programmable DNA binding protein domain may be programmed by a guide nucleotide sequence, and is thus referred as a “guide nucleotide sequence-programmable DNA binding-protein domain.” In some embodiments, the guide nucleotide sequence-programmable DNA binding protein is a nuclease inactive Cas9, or dCas9. A dCas9 as used herein, encompasses a Cas9 that is completely inactive in its nuclease activity, or partially inactive in its nuclease activity (e.g., a Cas9 nickase). Thus, in some embodiments, the guide nucleotide sequence-programmable DNA binding protein is a Cas9 nickase. In some embodiments, the guide nucleotide sequence-programmable DNA binding protein is a nuclease inactive Cpf1. In some embodiments, the guide nucleotide sequence-programmable DNA binding protein is a nuclease inactive Argonaute.

[0166] In some embodiments, the guide nucleotide sequence-programmable DNA binding protein is a dCas9 domain. In some embodiments, the guide nucleotide sequence-programmable DNA binding protein is a Cas9 nickase. In some embodiments, the dCas9 domain comprises an amino acid sequence of SEQ ID NO: 2 or SEQ ID NO: 3. In some embodiments, the dCas9 domain comprises an amino acid sequence that is at least 60%, at least 65%, at least 70%, at least 75%, at least 80%, at least 85%, at least 90%, at least 91%, at least 92%, at least 93%, at least 94%, at least 95%, at least 96%, at least 97%, at least 98%, at least 99%, or at least 99.5% identical to any one of the Cas9 domains provided herein (e.g., SEQ ID NOs: 1-3, and 11-260), and comprises mutations corresponding to D10X (X is any amino acid expcept for D) and/or H840X (X is any amino acid except for H) in SEQ ID NO: 1. In some embodiments, the dCas9 domain comprises an amino acid sequence that is at least 60%, at least 65%, at least 70%, at least 75%, at least 80%, at least 85%, at least 90%, at least 91%, at least 92%, at least 93%, at least 94%, at least 95%, at least 96%, at least 97%, at least 98%, at least 99%, or at least 99.5% identical to any one of the Cas9 domains provided herein (e.g., SEQ ID NOs: 1-3, and 11-260), and comprises mutations corresponding to D10A and/or H840A in SEQ ID NO: 1. In some embodiments, the Cas9 nickase comprises an amino acid sequence that is at least 60%, at least 65%, at least 70%, at least 75%, at least 80%, at least 85%, at least 90%, at least 91%, at least 92%, at least 93%, at least 94%, at least 95%, at least 96%, at least 97%, at least 98%, at least 99%, or at least 99.5% identical to any one of the Cas9 domains provided herein (e.g., 1-3, and 11-260), and comprises a mutation corresponding to D10X (X is any amino acid except for D) in SEQ ID NO: 1 and a histidine at a position correspond to position 840 in SEQ ID NO: 1. In some embodiments, the Cas9 nickase comprises an amino acid sequence that is at least 60%, at least 65%, at least 70%, at least 75%, at least 80%, at least 85%, at least 90%, at least 91%, at least 92%, at least 93%, at least 94%, at least 95%, at least 96%, at least 97%, at least 98%, at least 99%, or at least 99.5% identical to any one of the Cas9 domains provided herein (e.g., 1-3, and 11-260), and comprises mutations corresponding to D10A in SEQ ID NO: 1 and a histidine at a position correspond to position 840 in SEQ ID NO: 1. In some embodiments, variants or homologues of dCas9 or Cas9 nickase (e.g., variants of SEQ ID NO: 2 or SEQ ID NO: 3, respectively) are provided which are at least about 70% identical, at least about 80% identical, at least about 90% identical, at least about 95% identical, at least about 98% identical, at least about 99% identical, at least about 99.5% identical, or at least about 99.9% to SEQ ID NO: 2 or SEQ ID NO: 3, respectively, and comprises mutations corresponding to D10A and/or H840A in SEQ ID NO: 1. In some embodiments, variants of Cas9 (e.g., variants of SEQ ID NO: 2) are provided having amino acid sequences which are shorter, or longer than SEQ ID NO: 2, by about 5 amino acids, by about 10 amino acids, by about 15 amino acids, by about 20 amino acids, by about 25 amino acids, by about 30 amino acids, by about 40 amino acids, by about 50 amino acids, by about 75 amino acids, by about 100 amino acids, or more, provided that the dCas9 variants comprise mutations corresponding to D10A and/or H840A in SEQ ID NO: 1. In some embodiments, variants of Cas9 nickase (e.g., variants of SEQ ID NO: 3) are provided having amino acid sequences which are shorter, or longer than SEQ ID NO: 3, by about 5 amino acids, by about 10 amino acids, by about 15 amino acids, by about 20 amino acids, by about 25 amino acids, by about 30 amino acids, by about 40 amino acids, by about 50 amino acids, by about 75 amino acids, by about 100 amino acids, or more, provided that the dCas9 variants comprise mutations corresponding to D10A and comprises a histidine at a position corresponding to position 840 in SEQ ID NO: 1.

[0167] Additional suitable nuclease-inactive dCas9 domains will be apparent to those of skill in the art based on this disclosure and knowledge in the field, and are within the scope of this disclosure. Such additional exemplary suitable nuclease-inactive Cas9 domains include, but are not limited to, D10A/H840A, D10A/D839A/H840A, D10A/D839A/H840A/N863A mutant domains (See, e.g., Prashant et al., Nature Biotechnology. 2013; 31(9): 833-838, the entire contents of which are incorporated herein by reference), or K603R (See, e.g., Chavez et al., Nature Methods 12, 326-328, 2015, the entire contents of which is incorporated herein by reference.

[0168] Cas9 recognizes a short motif (PAM motif) in the CRISPR repeat sequences in the target DNA sequence. A “PAM motif,” or “protospacer adjacent motif,” as used herein, refers a DNA sequence immediately following the DNA sequence targeted by the Cas9 nuclease in the CRISPR bacterial adaptive immune system. PAM is a component of the invading virus or plasmid, but is not a component of the bacterial CRISPR locus. Naturally, Cas9 will not successfully bind to or cleave the target DNA sequence if it is not followed by the PAM sequence. PAM is an essential targeting component (not found in the bacterial genome) which distinguishes bacterial self from non-self DNA, thereby preventing the CRISPR locus from being targeted and destroyed by nuclease.

[0169] Wild-type Streptococcus pyogenes Cas9 recognizes a canonical PAM sequence (5′-NGG-3′). Other Cas9 nucleases (e.g., Cas9 from Streptococcus thermophiles, Staphylococcus aureus, Neisseria meningitidis, or Treponema denticolaor) and Cas9 variants thereof have been described in the art to have different, or more relaxed PAM requirements. For example, in Kleinstiver et al., Nature 523, 481-485, 2015; Klenstiver et al., Nature 529, 490-495, 2016; Ran et al., Nature, April 9; 520(7546): 186-191, 2015; Kleinstiver et al., Nat Biotechnol, 33(12):1293-1298, 2015; Hou et al., Proc Natl Acad Sci USA, 110(39):15644-9, 2014; Prykhozhij et al., PLoS One, 10(3): e0119372, 2015; Zetsche et al., Cell 163, 759-771, 2015; Gao et al., Nature Biotechnology, doi:10.1038/nbt.3547, 2016; Want et al., Nature 461, 754-761, 2009; Chavez et al., doi: dx.doi.org/10.1101/058974; Fagerlund et al., Genome Biol. 2015; 16: 25, 2015; Zetsche et al., Cell, 163, 759-771, 2015; and Swarts et al., Nat Struct Mol Biol, 21(9):743-53, 2014, the entire contents of each of which is incorporated herein by reference.

[0170] Thus, the guide nucleotide sequence-programmable DNA-binding protein of the present disclosure may recognize a variety of PAM sequences including, without limitation: NGG, NGAN, NGNG, NGAG, NGCG, NNGRRT, NGRRN, NNNRRT, NNNGATT, NNAGAAW, NAAAC, TTN, TTTN, and YTN, wherein Y is a pyrimidine, and N is any nucleobase.

[0171] One example of an RNA-programmable DNA-binding protein that has different PAM specificity is Clustered Regularly Interspaced Short Palindromic Repeats from Prevotella and Francisella 1 (Cpf1). Similar to Cas9, Cpf1 is also a class 2 CRISPR effector. It has been shown that Cpf1 mediates robust DNA interference with features distinct from Cas9. Cpf1 is a single RNA-guided endonuclease lacking tracrRNA, and it utilizes a T-rich protospacer-adjacent motif (TTN, TTTN, or YTN). Moreover, Cpf1 cleaves DNA via a staggered DNA double-stranded break. Out of 16 Cpf1-family proteins, two enzymes from Acidaminococcus and Lachnospiraceae are shown to have efficient genome-editing activity in human cells.

[0172] Also provided herein are nuclease-inactive Cpf1 (dCpf1) variants that may be used as a guide nucleotide sequence-programmable DNA-binding protein domain. The Cpf1 protein has a RuvC-like endonuclease domain that is similar to the RuvC domain of Cas9 but does not have a HNH endonuclease domain, and the N-terminal of Cpf1 does not have the alfa-helical recognition lobe of Cas9. It was shown in Zetsche et al., Cell, 163, 759-771, 2015 (the entire contents of which is incorporated herein by reference) that, the RuvC-like domain of Cpf1 is responsible for cleaving both DNA strands and inactivation of the RuvC-like domain inactivates Cpf1 nuclease activity. For example, mutations corresponding to D917A, E1006A, or D1255A in Francisella novicida Cpf1 (SEQ ID NO: 261) inactivates Cpf1 nuclease activity. In some embodiments, the dCpf1 of the present disclosure comprises mutations corresponding to D917A, E1006A, D1255A, D917A/E1006A, D917A/D1255A, E1006A/D1255A, or D917A/E1006A/D1255A in SEQ ID NO: 261. It is to be understood that any mutations, e.g., substitution mutations, deletions, or insertions that inactivates the RuvC domain of Cpf1 may be used in accordance with the present disclosure.

[0173] Thus, in some embodiments, the guide nucleotide sequence-programmable DNA binding protein is a nuclease inactive Cpf1 (dCpf1). In some embodiments, the dCpf1 comprises an amino acid sequence of any one SEQ ID NOs: 262-268. In some embodiments, the dCpf1 comprises an amino acid sequence that is at least 85%, at least 90%, at least 91%, at least 92%, at least 93%, at least 94%, at least 95%, at least 96%, at least 97%, at least 98%, at least 99%, or at ease 99.5% identical to any one of SEQ ID NOs: 262-268, and comprises mutations corresponding to D917A, E1006A, D1255A, D917A/E1006A, D917A/D1255A, E1006A/D1255A, or D917A/E1006A/D1255A in SEQ ID NO: 261.

Wild type Francisella novicida Cpf1
(D917, E1006, and D1255 are bolded and underlined)
(SEQ ID NO: 261)
MSIYQEFVNKYSLSKTLRFELIPQGKTLENIKARGLILDDEKRAKDYKKAKQIIDKYH
QFFIEEILSSVCISEDLLQNYSDVYFKLKKSDDDNLQKDFKSAKDTIKKQISEYIKDSE
KFKNLFNQNLIDAKKGQESDLILWLKQSKDNGIELFKANSDITDIDEALEIIKSFKGWT
TYFKGFHENRKNVYSSNDIPTSIIYRIVDDNLPKFLENKAKYESLKDKAPEAINYEQIK
KDLAEELTFDIDYKTSEVNQRVFSLDEVFEIANFNNYLNQSGITKFNTIIGGKFVNGEN
TKRKGINEYINLYSQQINDKTLKKYKMSVLFKQILSDTESKSFVIDKLEDDSDVVTTM
QSFYEQIAAFKTVEEKSIKETLSLLFDDLKAQKLDLSKIYFKNDKSLTDLSQQVFDDY
SVIGTAVLEYITQQIAPKNLDNPSKKEQELIAKKTEKAKYLSLETIKLALEEFNKHRDI
DKQCRFEEILANFAAIPMIFDEIAQNKDNLAQISIKYQNQGKKDLLQASAEDDVKAIK
DLLDQTNNLLHKLKIFHISQSEDKANILDKDEHFYLVFEECYFELANIVPLYNKIRNYI
TQKPYSDEKFKLNFENSTLANGWDKNKEPDNTAILFIKDDKYYLGVMNKKNNKIFD
DKAIKENKGEGYKKIVYKLLPGANKMLPKVFFSAKSIKFYNPSEDILRIRNHSTHTKN
GSPQKGYEKFEFNIEDCRKFIDFYKQSISKHPEWKDFGFRFSDTQRYNSIDEFYREVE
NQGYKLTFENISESYIDSVVNQGKLYLFQIYNKDFSAYSKGRPNLHTLYWKALFDER
NLQDVVYKLNGEAELFYRKQSIPKKITHPAKEAIANKNKDNPKKESVFEYDLIKDKR
FTEDKFFFHCPITINFKSSGANKFNDEINLLLKEKANDVHILSIDRGERHLAYYTLVDG
KGNIIKQDTFNIIGNDRMKTNYHDKLAAIEKDRDSARKDWKKINNIKEMKEGYLSQV
VHEIAKLVIEYNAIVVFEDLNFGFKRGRFKVEKQVYQKLEKMLIEKLNYLVFKDNEF
DKTGGVLRAYQLTAPFETFKKMGKQTGIIYYVPAGFTSKICPVTGFVNQLYPKYESV
SKSQEFFSKFDKICYNLDKGYFEFSFDYKNFGDKAAKGKWTIASFGSRLINFRNSDKN
HNWDTREVYPTKELEKLLKDYSIEYGHGECIKAAICGESDKKFFAKLTSVLNTILQM
RNSKTGTELDYLISPVADVNGNFFDSRQAPKNMPQDADANGAYHIGLKGLMLLGRI
KNNQEGKKLNLVIKNEEYFEFVQNRNN
Francisella novicida Cpf1 D917A
(A917, E1006, and D1255 are bolded and underlined)
(SEQ ID NO: 262)
MSIYQEFVNKYSLSKTLRFELIPQGKTLENIKARGLILDDEKRAKDYKKAKQIIDKYH
QFFIEEILSSVCISEDLLQNYSDVYFKLKKSDDDNLQKDFKSAKDTIKKQISEYIKDSE
KFKNLFNQNLIDAKKGQESDLILWLKQSKDNGIELFKANSDITDIDEALEIIKSFKGWT
TYFKGFHENRKNVYSSNDIPTSIIYRIVDDNLPKFLENKAKYESLKDKAPEAINYEQIK
KDLAEELTFDIDYKTSEVNQRVFSLDEVFEIANFNNYLNQSGITKFNTIIGGKFVNGEN
TKRKGINEYINLYSQQINDKTLKKYKMSVLFKQILSDTESKSFVIDKLEDDSDVVTTM
QSFYEQIAAFKTVEEKSIKETLSLLFDDLKAQKLDLSKIYFKNDKSLTDLSQQVFDDY
SVIGTAVLEYITQQIAPKNLDNPSKKEQELIAKKTEKAKYLSLETIKLALEEFNKHRDI
DKQCRFEEILANFAAIPMEDEIAQNKDNLAQISIKYQNQGKKDLLQASAEDDVKAIK
DLLDQTNNLLHKLKIFHISQSEDKANILDKDEHFYLVFEECYFELANIVPLYNKIRNYI
TQKPYSDEKFKLNFENSTLANGWDKNKEPDNTAILFIKDDKYYLGVMNKKNNKIFD
DKAIKENKGEGYKKIVYKLLPGANKMLPKVFFSAKSIKFYNPSEDILRIRNHSTHTKN
GSPQKGYEKFEFNIEDCRKFIDFYKQSISKHPEWKDFGFRFSDTQRYNSIDEFYREVE
NQGYKLTFENISESYIDSVVNQGKLYLFQIYNKDFSAYSKGRPNLHTLYWKALFDER
NLQDVVYKLNGEAELFYRKQSIPKKITHPAKEAIANKNKDNPKKESVFEYDLIKDKR
FTEDKFFFHCPITINFKSSGANKFNDEINLLLKEKANDVHILSIARGERHLAYYTLVDG
KGNIIKQDTFNIIGNDRMKTNYHDKLAAIEKDRDSARKDWKKINNIKEMKEGYLSQV
VHEIAKLVIEYNAIVVFEDLNFGFKRGRFKVEKQVYQKLEKMLIEKLNYLVFKDNEF
DKTGGVLRAYQLTAPFETFKKMGKQTGIIYYVPAGFTSKICPVTGFVNQLYPKYESV
SKSQEFFSKFDKICYNLDKGYFEFSFDYKNFGDKAAKGKWTIASFGSRLINFRNSDKN
HNWDTREVYPTKELEKLLKDYSIEYGHGECIKAAICGESDKKFFAKLTSVLNTILQM
RNSKTGTELDYLISPVADVNGNFFDSRQAPKNMPQDADANGAYHIGLKGLMLLGRI
KNNQEGKKLNLVIKNEEYFEFVQNRNN
Francisella novicida Cpf1 E1006A
(D917, A1006, and D1255 are bolded and underlined)
(SEQ ID NO: 263)
MSIYQEFVNKYSLSKTLRFELIPQGKTLENIKARGLILDDEKRAKDYKKAKQIIDKYH
QFFIEEILSSVCISEDLLQNYSDVYFKLKKSDDDNLQKDFKSAKDTIKKQISEYIKDSE
KFKNLFNQNLIDAKKGQESDLILWLKQSKDNGIELFKANSDITDIDEALEIIKSFKGWT
TYFKGFHENRKNVYSSNDIPTSIIYRIVDDNLPKFLENKAKYESLKDKAPEAINYEQIK
KDLAEELTFDIDYKTSEVNQRVFSLDEVFEIANFNNYLNQSGITKFNTIIGGKFVNGEN
TKRKGINEYINLYSQQINDKTLKKYKMSVLFKQILSDTESKSFVIDKLEDDSDVVTTM
QSFYEQIAAFKTVEEKSIKETLSLLFDDLKAQKLDLSKIYFKNDKSLTDLSQQVFDDY
SVIGTAVLEYITQQIAPKNLDNPSKKEQELIAKKTEKAKYLSLETIKLALEEFNKHRDI
DKQCRFEEILANFAAIPMIFDEIAQNKDNLAQISIKYQNQGKKDLLQASAEDDVKAIK
DLLDQTNNLLHKLKIFHISQSEDKANILDKDEHFYLVFEECYFELANIVPLYNKIRNYI
TQKPYSDEKFKLNFENSTLANGWDKNKEPDNTAILFIKDDKYYLGVMNKKNNKIFD
DKAIKENKGEGYKKIVYKLLPGANKMLPKVFFSAKSIKFYNPSEDILRIRNHSTHTKN
GSPQKGYEKFEFNIEDCRKFIDFYKQSISKHPEWKDFGFRFSDTQRYNSIDEFYREVE
NQGYKLTFENISESYIDSVVNQGKLYLFQIYNKDFSAYSKGRPNLHTLYWKALFDER
NLQDVVYKLNGEAELFYRKQSIPKKITHPAKEAIANKNKDNPKKESVFEYDLIKDKR
FTEDKFFFHCPITINFKSSGANKFNDEINLLLKEKANDVHILSIDRGERHLAYYTLVDG
KGNIIKQDTFNIIGNDRMKTNYHDKLAAIEKDRDSARKDWKKINNIKEMKEGYLSQV
VHEIAKLVIEYNAIVVFADLNFGFKRGRFKVEKQVYQKLEKMLIEKLNYLVFKDNEF
DKTGGVLRAYQLTAPFETFKKMGKQTGIIYYVPAGFTSKICPVTGFVNQLYPKYESV
SKSQEFFSKFDKICYNLDKGYFEFSFDYKNFGDKAAKGKWTIASFGSRLINFRNSDKN
HNWDTREVYPTKELEKLLKDYSIEYGHGECIKAAICGESDKKFFAKLTSVLNTILQM
RNSKTGTELDYLISPVADVNGNFFDSRQAPKNMPQDADANGAYHIGLKGLMLLGRI
KNNQEGKKLNLVIKNEEYFEFVQNRNN
Francisella novicida Cpf1 D1255A
(D917, E1006, and A1255 are bolded and underlined)
(SEQ ID NO: 264)
MSIYQEFVNKYSLSKTLRFELIPQGKTLENIKARGLILDDEKRAKDYKKAKQIIDKYH
QFFIEEILSSVCISEDLLQNYSDVYFKLKKSDDDNLQKDFKSAKDTIKKQISEYIKDSE
KFKNLFNQNLIDAKKGQESDLILWLKQSKDNGIELFKANSDITDIDEALEIIKSFKGWT
TYFKGFHENRKNVYSSNDIPTSIIYRIVDDNLPKFLENKAKYESLKDKAPEAINYEQIK
KDLAEELTFDIDYKTSEVNQRVFSLDEVFEIANFNNYLNQSGITKFNTIIGGKFVNGEN
TKRKGINEYINLYSQQINDKTLKKYKMSVLFKQILSDTESKSFVIDKLEDDSDVVTTM
QSFYEQIAAFKTVEEKSIKETLSLLFDDLKAQKLDLSKIYFKNDKSLTDLSQQVFDDY
SVIGTAVLEYITQQIAPKNLDNPSKKEQELIAKKTEKAKYLSLETIKLALEEFNKHRDI
DKQCRFEEILANFAAIPMEDEIAQNKDNLAQISIKYQNQGKKDLLQASAEDDVKAIK
DLLDQTNNLLHKLKIFHISQSEDKANILDKDEHFYLVFEECYFELANIVPLYNKIRNYI
TQKPYSDEKFKLNFENSTLANGWDKNKEPDNTAILFIKDDKYYLGVMNKKNNKIFD
DKAIKENKGEGYKKIVYKLLPGANKMLPKVFFSAKSIKFYNPSEDILRIRNHSTHTKN
GSPQKGYEKFEFNIEDCRKFIDFYKQSISKHPEWKDFGFRFSDTQRYNSlDEFYREVE
NQGYKLTFENISESYIDSVVNQGKLYLFQIYNKDFSAYSKGRPNLHTLYWKALFDER
NLQDVVYKLNGEAELFYRKQSIPKKITHPAKEAIANKNKDNPKKESVFEYDLIKDKR
FTEDKFFFHCPITINFKSSGANKFNDEINLLLKEKANDVHILSIDRGERHLAYYTLVDG
KGNIIKQDTFNIIGNDRMKTNYHDKLAAIEKDRDSARKDWKKINNIKEMKEGYLSQV
VHEIAKLVIEYNAIVVFEDLNFGFKRGRFKVEKQVYQKLEKMLIEKLNYLVFKDNEF
DKTGGVLRAYQLTAPFETFKKMGKQTGIIYYVPAGFTSKICPVTGFVNQLYPKYESV
SKSQEFFSKFDKICYNLDKGYFEFSFDYKNFGDKAAKGKWTIASFGSRLINFRNSDKN
HNWDTREVYPTKELEKLLKDYSIEYGHGECIKAAICGESDKKFFAKLTSVLNTILQM
RNSKTGTELDYLISPVADVNGNFFDSRQAPKNMPQDAAANGAYHIGLKGLMLLGRI
KNNQEGKKLNLVIKNEEYFEFVQNRNN
Francisella novicida Cpf1 D917A/E1006A
(A917, A1006, and D1255 are bolded and underlined)
(SEQ ID NO: 265)
MSIYQEFVNKYSLSKTLRFELIPQGKTLENIKARGLILDDEKRAKDYKKAKQIIDKYH
QFFIEEILSSVCISEDLLQNYSDVYFKLKKSDDDNLQKDFKSAKDTIKKQISEYIKDSE
KFKNLFNQNLIDAKKGQESDLILWLKQSKDNGIELFKANSDITDIDEALEIIKSFKGWT
TYFKGFHENRKNVYSSNDIPTSIIYRIVDDNLPKFLENKAKYESLKDKAPEAINYEQIK
KDLAEELTFDIDYKTSEVNQRVFSLDEVFEIANFNNYLNQSGITKFNTIIGGKFVNGEN
TKRKGINEYINLYSQQINDKTLKKYKMSVLFKQILSDTESKSFVIDKLEDDSDVVTTM
QSFYEQIAAFKTVEEKSIKETLSLLFDDLKAQKLDLSKIYFKNDKSLTDLSQQVFDDY
SVIGTAVLEYITQQIAPKNLDNPSKKEQELIAKKTEKAKYLSLETIKLALEEFNKHRDI
DKQCRFEEILANFAAIPMEDEIAQNKDNLAQISIKYQNQGKKDLLQASAEDDVKAIK
DLLDQTNNLLHKLKIFHISQSEDKANILDKDEHFYLVFEECYFELANIVPLYNKIRNYI
TQKPYSDEKFKLNFENSTLANGWDKNKEPDNTAILFIKDDKYYLGVMNKKNNKIFD
DKAIKENKGEGYKKIVYKLLPGANKMLPKVFFSAKSIKFYNPSEDILRIRNHSTHTKN
GSPQKGYEKFEFNIEDCRKFIDFYKQSISKHPEWKDFGFRFSDTQRYNSlDEFYREVE
NQGYKLTFENISESYIDSVVNQGKLYLFQIYNKDFSAYSKGRPNLHTLYWKALFDER
NLQDVVYKLNGEAELFYRKQSIPKKITHPAKEAIANKNKDNPKKESVFEYDLIKDKR
FTEDKFFFHCPITINFKSSGANKFNDEINLLLKEKANDVHILSIARGERHLAYYTLVDG
KGNIIKQDTFNIIGNDRMKTNYHDKLAAIEKDRDSARKDWKKINNIKEMKEGYLSQV
VHEIAKLVIEYNAIVVFADLNFGFKRGRFKVEKQVYQKLEKMLIEKLNYLVFKDNEF
DKTGGVLRAYQLTAPFETFKKMGKQTGIIYYVPAGFTSKICPVTGFVNQLYPKYESV
SKSQEFFSKFDKICYNLDKGYFEFSFDYKNFGDKAAKGKWTIASFGSRLINFRNSDKN
HNWDTREVYPTKELEKLLKDYSIEYGHGECIKAAICGESDKKFFAKLTSVLNTILQM
RNSKTGTELDYLISPVADVNGNFFDSRQAPKNMPQDADANGAYHIGLKGLMLLGRI
KNNQEGKKLNLVIKNEEYFEFVQNRNN
Francisella novicida Cpf1 D917A/D1255A
(A917, E1006, and A1255 are bolded and underlined)
(SEQ ID NO: 266)
MSIYQEFVNKYSLSKTLRFELIPQGKTLENIKARGLILDDEKRAKDYKKAKQIIDKYH
QFFIEEILSSVCISEDLLQNYSDVYFKLKKSDDDNLQKDFKSAKDTIKKQISEYIKDSE
KFKNLFNQNLIDAKKGQESDLILWLKQSKDNGIELFKANSDITDIDEALEIIKSFKGWT
TYFKGFHENRKNVYSSNDIPTSIIYRIVDDNLPKFLENKAKYESLKDKAPEAINYEQIK
KDLAEELTFDIDYKTSEVNQRVFSLDEVFEIANFNNYLNQSGITKFNTIIGGKFVNGEN
TKRKGINEYINLYSQQINDKTLKKYKMSVLFKQILSDTESKSFVIDKLEDDSDVVTTM
QSFYEQIAAFKTVEEKSIKETLSLLFDDLKAQKLDLSKIYFKNDKSLTDLSQQVFDDY
SVIGTAVLEYITQQIAPKNLDNPSKKEQELIAKKTEKAKYLSLETIKLALEEFNKHRDI
DKQCRFEEILANFAAIPMEDEIAQNKDNLAQISIKYQNQGKKDLLQASAEDDVKAIK
DLLDQTNNLLHKLKIFHISQSEDKANILDKDEHFYLVFEECYFELANIVPLYNKIRNYI
TQKPYSDEKFKLNFENSTLANGWDKNKEPDNTAILFIKDDKYYLGVMNKKNNKIFD
DKAIKENKGEGYKKIVYKLLPGANKMLPKVFFSAKSIKFYNPSEDILRIRNHSTHTKN
GSPQKGYEKFEFNIEDCRKFIDFYKQSISKHPEWKDFGFRFSDTQRYNSIDEFYREVE
NQGYKLTFENISESYIDSVVNQGKLYLFQIYNKDFSAYSKGRPNLHTLYWKALFDER
NLQDVVYKLNGEAELFYRKQSIPKKITHPAKEAIANKNKDNPKKESVFEYDLIKDKR
FTEDKFFFHCPITINFKSSGANKFNDEINLLLKEKANDVHILSIARGERHLAYYTLVDG
KGNIIKQDTFNIIGNDRMKTNYHDKLAAIEKDRDSARKDWKKINNIKEMKEGYLSQV
VHEIAKLVIEYNAIVVFEDLNFGFKRGRFKVEKQVYQKLEKMLIEKLNYLVFKDNEF
DKTGGVLRAYQLTAPFETFKKMGKQTGIIYYVPAGFTSKICPVTGFVNQLYPKYESV
SKSQEFFSKFDKICYNLDKGYFEFSFDYKNFGDKAAKGKWTIASFGSRLINFRNSDKN
HNWDTREVYPTKELEKLLKDYSIEYGHGECIKAAICGESDKKFFAKLTSVLNTILQM
RNSKTGTELDYLISPVADVNGNFFDSRQAPKNMPQDAAANGAYHIGLKGLMLLGRI
KNNQEGKKLNLVIKNEEYFEFVQNRNN
Francisella novicida Cpf1 E1006A/D1255A
(D917, A1006, and A1255 are bolded and underlined)
(SEQ ID NO: 267)
MSIYQEFVNKYSLSKTLRFELIPQGKTLENIKARGLILDDEKRAKDYKKAKQIIDKYH
QFFIEEILSSVCISEDLLQNYSDVYFKLKKSDDDNLQKDFKSAKDTIKKQISEYIKDSE
KFKNLFNQNLIDAKKGQESDLILWLKQSKDNGIELFKANSDITDIDEALEIIKSFKGWT
TYFKGFHENRKNVYSSNDIPTSIIYRIVDDNLPKFLENKAKYESLKDKAPEAINYEQIK
KDLAEELTFDIDYKTSEVNQRVFSLDEVFEIANFNNYLNQSGITKFNTIIGGKFVNGEN
TKRKGINEYINLYSQQINDKTLKKYKMSVLFKQILSDTESKSFVIDKLEDDSDVVTTM
QSFYEQIAAFKTVEEKSIKETLSLLFDDLKAQKLDLSKIYFKNDKSLTDLSQQVFDDY
SVIGTAVLEYITQQIAPKNLDNPSKKEQELIAKKTEKAKYLSLETIKLALEEFNKHRDI
DKQCRFEEILANFAAIPMIFDEIAQNKDNLAQISIKYQNQGKKDLLQASAEDDVKAIK
DLLDQTNNLLHKLKIFHISQSEDKANILDKDEHFYLVFEECYFELANIVPLYNKIRNYI
TQKPYSDEKFKLNFENSTLANGWDKNKEPDNTAILFIKDDKYYLGVMNKKNNKIFD
DKAIKENKGEGYKKIVYKLLPGANKMLPKVFFSAKSIKFYNPSEDILRIRNHSTHTKN
GSPQKGYEKFEFNIEDCRKFIDFYKQSISKHPEWKDFGFRFSDTQRYNSIDEFYREVE
NQGYKLTFENISESYIDSVVNQGKLYLFQIYNKDFSAYSKGRPNLHTLYWKALFDER
NLQDVVYKLNGEAELFYRKQSIPKKITHPAKEAIANKNKDNPKKESVFEYDLIKDKR
FTEDKFFFHCPITINFKSSGANKFNDEINLLLKEKANDVHILSIDRGERHLAYYTLVDG
KGNIIKQDTFNIIGNDRMKTNYHDKLAAIEKDRDSARKDWKKINNIKEMKEGYLSQV
VHEIAKLVIEYNAIVVFADLNFGFKRGRFKVEKQVYQKLEKMLIEKLNYLVFKDNEF
DKTGGVLRAYQLTAPFETFKKMGKQTGIIYYVPAGFTSKICPVTGFVNQLYPKYESV
SKSQEFFSKFDKICYNLDKGYFEFSFDYKNFGDKAAKGKWTIASFGSRLINFRNSDKN
HNWDTREVYPTKELEKLLKDYSIEYGHGECIKAAICGESDKKFFAKLTSVLNTILQM
RNSKTGTELDYLISPVADVNGNFFDSRQAPKNMPQDAAANGAYHIGLKGLMLLGRI
KNNQEGKKLNLVIKNEEYFEFVQNRNN
Francisella novicida Cpf1 D917A/E1006A/D1255A
(A917, A1006, and A1255 are bolded and underlined)
(SEQ ID NO: 268)
MSIYQEFVNKYSLSKTLRFELIPQGKTLENIKARGLILDDEKRAKDYKKAKQIIDKYH
QFFIEEILSSVCISEDLLQNYSDVYFKLKKSDDDNLQKDFKSAKDTIKKQISEYIKDSE
KFKNLFNQNLIDAKKGQESDLILWLKQSKDNGIELFKANSDITDIDEALEIIKSFKGWT
TYFKGFHENRKNVYSSNDIPTSIIYRIVDDNLPKFLENKAKYESLKDKAPEAINYEQIK
KDLAEELTFDIDYKTSEVNQRVFSLDEVFEIANFNNYLNQSGITKFNTIIGGKFVNGEN
TKRKGINEYINLYSQQINDKTLKKYKMSVLFKQILSDTESKSFVIDKLEDDSDVVTTM
QSFYEQIAAFKTVEEKSIKETLSLLFDDLKAQKLDLSKIYFKNDKSLTDLSQQVFDDY
SVIGTAVLEYITQQIAPKNLDNPSKKEQELIAKKTEKAKYLSLETIKLALEEFNKHRDI
DKQCRFEEILANFAAIPMWDEIAQNKDNLAQISIKYQNQGKKDLLQASAEDDVKAIK
DLLDQTNNLLHKLKIFHISQSEDKANILDKDEHFYLVFEECYFELANIVPLYNKIRNYI
TQKPYSDEKFKLNFENSTLANGWDKNKEPDNTAILFIKDDKYYLGVMNKKNNKIFD
DKAIKENKGEGYKKIVYKLLPGANKMLPKVFFSAKSIKFYNPSEDILRIRNHSTHTKN
GSPQKGYEKFEFNIEDCRKFIDFYKQSISKHPEWKDFGFRFSDTQRYNSIDEFYREVE
NQGYKLTFENISESYIDSVVNQGKLYLFQIYNKDFSAYSKGRPNLHTLYWKALFDER
NLQDVVYKLNGEAELFYRKQSIPKKITHPAKEAIANKNKDNPKKESVFEYDLIKDKR
FTEDKFFFHCPITINFKSSGANKFNDEINLLLKEKANDVHILSIARGERHLAYYTLVDG
KGNIIKQDTFNIIGNDRMKTNYHDKLAAIEKDRDSARKDWKKINNIKEMKEGYLSQV
VHEIAKLVIEYNAIVVFADLNFGFKRGRFKVEKQVYQKLEKMLIEKLNYLVFKDNEF
DKTGGVLRAYQLTAPFETFKKMGKQTGIIYYVPAGFTSKICPVTGFVNQLYPKYESV
SKSQEFFSKFDKICYNLDKGYFEFSFDYKNFGDKAAKGKWTIASFGSRLINFRNSDKN
HNWDTREVYPTKELEKLLKDYSIEYGHGECIKAAICGESDKKFFAKLTSVLNTILQM
RNSKTGTELDYLISPVADVNGNFFDSRQAPKNMPQDAAANGAYHIGLKGLMLLGRI
KNNQEGKKLNLVIKNEEYFEFVQNRNN

[0174] In some embodiments, the guide nucleotide sequence-programmable DNA-binding protein domain of the present disclosure has no requirements for a PAM sequence. One example of such guide nucleotide sequence-programmable DNA-binding protein may be an Argonaute protein from Natronobacterium gregoryi (NgAgo). NgAgo is a ssDNA-guided endonuclease. NgAgo binds 5′ phosphorylated ssDNA of ˜24 nucleotides (gDNA) to guide it to its target site and will make DNA double-strand breaks at gDNA site. In contrast to Cas9, the NgAgo-gDNA system does not require a protospacer-adjacent motif (PAM). Using a nuclease inactive NgAgo (dNgAgo) can greatly expand the codons that may be targeted. The characterization and use of NgAgo have been described in Gao et al., Nat Biotechnol. Epub 2016 May 2. PubMed PMID: 27136078; Swarts et al., Nature. 507(7491) (2014):258-61; and Swarts et al., Nucleic Acids Res. 43(10) (2015):5120-9, the entire contents of each of which are incorporated herein by reference. The sequence of Natronobacterium gregoryi Argonaute is provided in SEQ ID NO: 269.

Wild type Natronobacterium gregoryi Argonaute
(SEQ ID NO: 269)
MTVIDLDSTTTADELTSGHTYDISVTLTGVYDNTDEQHPRMSLAFEQDNG
ERRYITLWKNTTPKDVFTYDYATGSTYIFTNIDYEVKDGYENLTATYQTT
VENATAQEVGTTDEDETFAGGEPLDHHLDDALNETPDDAETESDSGHVMT
SFASRDQLPEWTLHTYTLTATDGAKTDTEYARRTLAYTVRQELYTDHDAA
PVATDGLMLLTPEPLGETPLDLDCGVRVEADETRTLDYTTAKDRLLAREL
VEEGLKRSLWDDYLVRGIDEVLSKEPVLTCDEFDLHERYDLSVEVGHSGR
AYLHINFRHRFVPKLTLADIDDDNIYPGLRVKTTYRPRRGHIVWGLRDEC
ATDSLNTLGNQSVVAYHRNNQTPINTDLLDAIEAADRRVVETRRQGHGDD
AVSFPQELLAVEPNTHQIKQFASDGFHQQARSKTRLSASRCSEKAQAFAE
RLDPVRLNGSTVEFSSEFFTGNNEQQLRLLYENGESVLTFRDGARGAHPD
ETFSKGIVNPPESFEVAVVLPEQQADTCKAQWDTMADLLNQAGAPPTRSE
TVQYDAFSSPESISLNVAGAIDPSEVDAAFVVLPPDQEGFADLASPTETY
DELKKALANMGIYSQMAYFDRFRDAKIFYTRNVALGLLAAAGGVAFTTEH
AMPGDADMFIGIDVSRSYPEDGASGQINIAATATAVYKDGTILGHSSTRP
QLGEKLQSTDVRDIMKNAILGYQQVTGESPTHIVIHRDGFMNEDLDPATE
FLNEQGVEYDIVEIRKQPQTRLLAVSDVQYDTPVKSIAAINQNEPRATVA
TFGAPEYLATRDGGGLPRPIQIERVAGETDIETLTRQVYLLSQSHIQVHN
STARLPITTAYADQASTHATKGYLVQTGAFESNVGFL

[0175] Also provided herein are Cas9 variants that have relaxed PAM requirements (PAMless Cas9). PAMless Cas9 exhibits an increased activity on a target sequence that does not comprise a canonical PAM (NGG) at its 3′-end as compared to Streptococcus pyogenes Cas9 as provided by SEQ ID NO: 1, e.g., increased activity by at least 5-fold, at least 10-fold, at least 50-fold, at least 100-fold, at least 500-fold, at least 1,000-fold, at least 5,000-fold, at least 10,000-fold, at least 50,000-fold, at least 100,000-fold, at least 500,000-fold, or at least 1,000,000-fold. Such Cas9 variants that have relaxed PAM requirements are described in U.S. Provisional Applications 62/245,828, 62/279,346, 62/311,763, 62/322,178, and 62/357,332, the entire contents of each of which are incorporated herein by reference. In some embodiments, the dCas9 or Cas9 nickase of the present disclosure may further comprise mutations that relax the PAM requirements, e.g., mutations that correspond to A262T, K294R, S409I, E480K, E543D, M694I, or E1219V in SEQ ID NO: 1.

[0176] In some embodiments, the nucleobase editors of the present disclosure comprises: (i) a guide nucleotide sequence-programmable DNA-binding protein domain; and (ii) a deaminase domain. In certain embodiments, the deaminase domain of the fusion protein is a cytosine deaminase.

[0177] In some embodiments, the deaminase is an APOBEC1 deaminase. In some embodiments, the deaminase is a rat APOBEC1. In some embodiments, the deaminase is a human APOBEC1. In some embodiments, the deaminase is an APOBEC2 deaminase. In some embodiments, the deaminase is an APOBEC3A deaminase. In some embodiments, the deaminase is an APOBEC3B deaminase. In some embodiments, the deaminase is an APOBEC3C deaminase. In some embodiments, the deaminase is an APOBEC3D deaminase. In some embodiments, is an APOBEC3F deaminase. In some embodiments, the deaminase is an APOBEC3G deaminase. In some embodiments, the deaminase is an APOBEC3H deaminase. In some embodiments, the deaminase is an APOBEC4 deaminase. In some embodiments, the deaminase is an activation-induced deaminase (AID). In some embodiments, the deaminase is a Lamprey CDA1 (pmCDA1). In some embodiments, the deaminase is an APOBEC3G variant comprising the D316R_D317R mutations. Exemplary, non-limiting cytosine deaminase sequences that may be used in accordance with the methods of the present disclosure are provided in Example 1 of the present disclosure.

[0178] In some embodiments, the cytosine deaminase is a wild type deaminase or a deaminase as set forth in SEQ ID NOs: 270-288 and 378-381. In some embodiments, the cytosine deaminase domains of the fusion proteins provided herein include fragments of deaminases and proteins homologous to a deaminase or a deaminase fragment. For example, in some embodiments, a deaminase domain may comprise a fragment of the amino acid sequence set forth in any of SEQ ID NOs: 270-288 and 378-381. In some embodiments, a deaminase domain comprises an amino acid sequence homologous to the amino acid sequence set forth in any of SEQ ID NOs: 270-288 and 378-381 or an amino acid sequence homologous to a fragment of the amino acid sequence set forth in any of SEQ ID NOs: 270-288 and 378-381. In some embodiments, proteins comprising a deaminase or fragments of a deaminase or homologs of a deaminase or deaminase fragments are referred to as “deaminase variants.” A deaminase variant shares homology to a deaminase, or a fragment thereof. For example a deaminase variant is at least about 70% identical, at least about 80% identical, at least about 90% identical, at least about 95% identical, at least about 96% identical, at least about 97% identical, at least about 98% identical, at least about 99% identical, at least about 99.5% identical, or at least about 99.9% to a wild type deaminase or a deaminase as set forth in any of SEQ ID NOs: 270-288 and 378-381. In some embodiments, the deaminase variant comprises a fragment of the deaminase, such that the fragment is at least about 70% identical, at least about 80% identical, at least about 90% identical, at least about 95% identical, at least about 96% identical, at least about 97% identical, at least about 98% identical, at least about 99% identical, at least about 99.5% identical, or at least about 99.9% to the corresponding fragment of wild type deaminase or a deaminase as set forth in any of SEQ ID NOs: 270-288 and 378-381. In some embodiments, the cytosine deaminase is at least at least about 70% identical, at least about 80% identical, at least about 90% identical, at least about 95% identical, at least about 96% identical, at least about 97% identical, at least about 98% identical, at least about 99% identical, at least about 99.5% identical, or at least about 99.9% identical to an APOBEC3G variant as set forth in SEQ ID NO: 380 or SEQ ID NO: 381, and comprises mutations corresponding to the D316E_D317R mutations in SEQ ID NO: 380.

[0179] In some embodiments, the cytosine deaminase domain may be fused to the N-terminus of the guide nucleotide sequence-programmable DNA-binding protein domain. For example, the fusion protein may have an architecture of NH₂-[cytosine deaminase]-[guide nucleotide sequence-programmable DNA-binding protein domain]-COOH. The “]-[” used in the general architecture above indicates the presence of an optional linker sequence. The term “linker,” as used herein, refers to a chemical group or a molecule linking two molecules or moieties, e.g., two domains of a fusion protein, such as, for example, a dCas9 domain and a cytosine deaminase domain. Typically, the linker is positioned between, or flanked by, two groups, molecules, or other moieties and connected to each one via a covalent bond, thus connecting the two. In some embodiments, the linker is an amino acid or a plurality of amino acids (e.g., a peptide or protein). In some embodiments, the linker is an organic molecule, group, polymer, or chemical moiety. In some embodiments, the linker is 5-100 amino acids in length, for example, 5, 6, 7, 8, 9, 10, 11, 12, 13, 14, 15, 16, 17, 18, 19, 20, 21, 22, 23, 24, 25, 26, 27, 28, 29, 30, 30-35, 35-40, 40-45, 45-50, 50-60, 60-70, 70-80, 80-90, 90-100, 100-150, or 150-200 amino acids in length. Longer or shorter linkers are also contemplated.

[0180] In some embodiments, the cytosine deaminase domain and the Cas9 domain are fused to each other via a linker. Various linker lengths and flexibilities between the deaminase domain (e.g., APOBEC1) and the Cas9 domain can be employed (e.g., ranging from very flexible linkers of the form (GGGS)ₙ (SEQ ID NO: 362), (GGGGS)ₙ (SEQ ID NO: 363), (GGS)ₙ, and (G)ₙ to more rigid linkers of the form (EAAAK)ₙ (SEQ ID NO: 364), SGSETPGTSESATPES (SEQ ID NO: 365) (see, e.g., Guilinger J P et, al., Nat. Biotechnol. 2014; 32(6): 577-82; the entire contents are incorporated herein by reference), (XP)ₙ, or a combination of any of these, wherein X is any amino acid and n is independently an integer between 1 and 30, in order to achieve the optimal length for deaminase activity for the specific application. In some embodiments, n is independently 1, 2, 3, 4, 5, 6, 7, 8, 9, 10, 11, 12, 13, 14, 15, 16, 17, 18, 19, 20, 21, 22, 23, 24, 25, 26, 27, 28, 29, or 30, or, if more than one linker or more than one linker motif is present, any combination thereof. In some embodiments, the linker comprises a (GGS)ₙ motif, wherein n is 1, 2, 3, 4, 5, 6, 7, 8, 9, 10, 11, 12, 13, 14 or 15. In some embodiments, the linker comprises a (GGS)ₙ motif, wherein n is 1, 3, or 7. In some embodiments, the linker comprises the amino acid sequence SGSETPGTSESATPES (SEQ ID NO: 365), also referred to as the XTEN linker. In some embodiments, the linker comprises an amino acid sequence chosen from the group including, but not limited to, AGVF, GFLG, FK, AL, ALAL, or ALALA. Additional suitable linker motifs and linker configurations will be apparent to those of skill in the art. In some embodiments, suitable linker motifs and configurations include those described in Chen et al., Fusion protein linkers: property, design and functionality. Adv Drug Deliv Rev. 2013; 65(10):1357-69, the entire contents of which are incorporated herein by reference. In some embodimetns, the linker may comprise any of the following amino acid sequences: VPFLLEPDNINGKTC (SEQ ID NO: 387), GSAGSAAGSGEF (SEQ ID NO: 388), SIVAQLSRPDPA (SEQ ID NO: 389), MKIIEQLPSA (SEQ ID NO: 390), VRHKLKRVGS (SEQ ID NO: 391), GHGTGSTGSGSS (SEQ ID NO: 392), MSRPDPA (SEQ ID NO: 393), GSAGSAAGSGEF (SEQ ID NO: 394), SGSETPGTSESA (SEQ ID NO: 395), SGSETPGTSESATPEGGSGGS (SEQ ID NO: 396), or GGSM (SEQ ID NO: 397). Additional suitable linker sequences will be apparent to those of skill in the art based on the instant disclosure.

[0181] To successfully edit the targeted C base, linker length is important, as described in Komor et al., Programmable editing of a target base in genomic DNA without double-stranded DNA cleavage, Nature, 533(7603):420-4, 2016, the entire contents of which are incorporated herein by reference. A 3-aa linker gives a 3-base editing window relative to the PAM sequence. A 9-aa linker gives a 4-base editing window relative to the PAM sequence. A 16-aa linker (e.g., the SGSETPGTSESATPES linker; SEQ ID NO: 365) gives a 5-base window relative to the PAM sequence with unusually strong activity. A 21-aa linker gives a ˜6-base editing window relative to the PAM sequence. Each of these windows can be useful for editing different targeted C bases. For example, the targeted C bases may be at different distances from the adjacent PAM sequence, and by varying the linker length, the precise editing of the desired C base is ensured. One skilled in the art, based on the teachings of CRISPR/Cas9 technology, in particular the teachings of U.S. Pat. No. 9,068,179, US Patent Application Publications US20150166980, US20150166981, US20150166982, US20150166984, and US20150165054, and U.S. Provisional Applications, 62/245,828, 62/279,346, 62/311,763, 62/322,178, and 62/357,352, and 62/370,700, 62/398,490, 62/498,686, PCT Application NO. PCT/US2016/058344, U.S. patent application Ser. No. 15/331,852, and in Komor et al., Programmable editing of a target base in genomic DNA without double-stranded DNA cleavage, Nature, 533(7603):420-4, 2016, the entire contents of each of which are incorporated herein by reference.

[0182] will be able to determine the window of editing for his/her purpose, and properly design the linker of the cytosine deaminase-dCas9 protein for the precise targeting of the desired C base.

[0183] In some embodiments, the fusion protein useful in the present disclosure further comprises a uracil glycosylase inhibitor (UGI) domain. A “uracil glycosylase inhibitor” refers to a protein or polypeptide that inhibits the activity of uracil-DNA glycosylase. The C to T base change induced by deamination results in a U:G heteroduplex, which triggers cellular DNA-repair response. For example, uracil DNA glycosylase (UDG) catalyzes removal of U from DNA in cells and initiates base excision repair, with reversion of the U:G pair to a C:G pair as the most common outcome. Thus, such cellular DNA-repair response may be responsible for the decrease in nucleobase editing efficiency in cells. Uracil DNA Glycosylase Inhibitor (UGI) is known in the art to potently blocks human UDG activity. As also described in Komor et al., Programmable editing of a target base in genomic DNA without double-stranded DNA cleavage, Nature, 533(7603):420-4, 2016, fusing a UGI domain to the cytidine deaminase-dCas9 fusion protein efficiently reduced the activity of UDG and significantly enhanced editing efficiency.

[0184] Suitable UGI protein and nucleotide sequences are provided herein and additional suitable UGI sequences are known to those in the art, and include, for example, those published in Wang et al., Uracil-DNA glycosylase inhibitor gene of bacteriophage PBS2 encodes a binding protein specific for uracil-DNA glycosylase. J. Biol. Chem. 264:1163-1171(1989); Lundquist et al., Site-directed mutagenesis and characterization of uracil-DNA glycosylase inhibitor protein. Role of specific carboxylic amino acids in complex formation with Escherichia coli uracil-DNA glycosylase. J. Biol. Chem. 272:21408-21419(1997); Ravishankar et al., X-ray analysis of a complex of Escherichia coli uracil DNA glycosylase (EcUDG) with a proteinaceous inhibitor. The structure elucidation of a prokaryotic UDG. Nucleic Acids Res. 26:4880-4887(1998); and Putnam et al., Protein mimicry of DNA from crystal structures of the uracil-DNA glycosylase inhibitor protein and its complex with Escherichia coli uracil-DNA glycosylase. J. Mol. Biol. 287:331-346(1999), the entire contents of which are incorporated herein by reference. In some embodiments, the UGI comprises the following amino acid sequence: Uracil-DNA glycosylase inhibitor MTNLSDIIEKETGKQLVIQESILMLPEEVEEVIGNKPESDILVHTAYDESTDENVMLLTSDAPEYKPWAL VIQDSNGENKIKML (SEQ ID NO: 290)

[0185] In some embodiments, the UGI comprises a wild type UGI or a UGI as set forth in SEQ ID NO: 290. In some embodiments, the UGI proteins provided herein include fragments of UGI and proteins homologous to a UGI or a UGI fragment. For example, in some embodiments, a UGI comprises a fragment of the amino acid sequence set forth in SEQ ID NO: 290. In some embodiments, a UGI comprises an amino acid sequence homologous to the amino acid sequence set forth in SEQ ID NO: 290 or an amino acid sequence homologous to a fragment of the amino acid sequence set forth in SEQ ID NO: 290. In some embodiments, proteins comprising UGI or fragments of UGI or homologs of UGI or UGI fragments are referred to as “UGI variants.” A UGI variant shares homology to UGI, or a fragment thereof. For example a UGI variant is at least about 70% identical, at least about 80% identical, at least about 90% identical, at least about 95% identical, at least about 96% identical, at least about 97% identical, at least about 98% identical, at least about 99% identical, at least about 99.5% identical, or at least about 99.9% to a wild type UGI or a UGI as set forth in SEQ ID NO: 290. In some embodiments, the UGI variant comprises a fragment of UGI, such that the fragment is at least about 70% identical, at least about 80% identical, at least about 90% identical, at least about 95% identical, at least about 96% identical, at least about 97% identical, at least about 98% identical, at least about 99% identical, at least about 99.5% identical, or at least about 99.9% to the corresponding fragment of wild type UGI or a UGI as set forth in SEQ ID NO: 290.

[0186] In some embodiments, the UGI domain is fused to the C-terminus of the dCas9 domain in the fusion protein. Thus, the fusion protein would have an architecture of NH₂-[cytosine deaminase]-[guide nucleotide sequence-programmable DNA-binding protein domain]-[UGI]-COOH. In some embodiments, the UGI domain is fused to the N-terminus of the cytosine deaminase domain. As such, the fusion protein would have an architecture of NH₂-[UGI]-[cytosine deaminase]-[guide nucleotide sequence-programmable DNA-binding protein domain]-COOH. In some embodiments, the UGI domain is fused between the guide nucleotide sequence-programmable DNA-binding protein domain and the cytosine deaminase domain. As such, the fusion protein would have an architecture of NH₂-[cytosine deaminase]-[UGI]-[guide nucleotide sequence-programmable DNA-binding protein domain]-COOH. The linker sequences described herein may also be used for the fusion of the UGI domain to the cytosine deaminase-dCas9 fusion proteins.

[0187] In some embodiments, the fusion protein comprises the structure:

[cytosine deaminase]-[optional linker sequence]-[guide nucleotide sequence-programmable DNA binding protein]-[optional linker sequence]-[UGI];
[cytosine deaminase]-[optional linker sequence]-[UGI]-[optional linker sequence]-[guide nucleotide sequence-programmable DNA binding protein];
[UGI]-[optional linker sequence]-[cytosine deaminase]-[optional linker sequence]-[guide nucleotide sequence-programmable DNA binding protein];
[UGI]-[optional linker sequence]-[guide nucleotide sequence-programmable DNA binding protein]-[optional linker sequence]-[cytosine deaminase];
[guide nucleotide sequence-programmable DNA binding protein]-[optional linker sequence]-[cytosine deaminase]-[optional linker sequence]-[UGI]; or
[guide nucleotide sequence-programmable DNA binding protein]-[optional linker sequence]-[UGI]-[optional linker sequence]-[cytosine deaminase].

[0188] In some embodiments, the fusion protein comprises the structure:

[cytosine deaminase]-[optional linker sequence]-[Cas9 nickase]-[optional linker sequence]-[UGI];
[cytosine deaminase]-[optional linker sequence]-[UGI]-[optional linker sequence]-[Cas9 nickase];
[UGI]-[optional linker sequence]-[cytosine deaminase]-[optional linker sequence]-[Cas9 nickase];
[UGI]-[optional linker sequence]-[Cas9 nickase]-[optional linker sequence]-[cytosine deaminase];
[Cas9 nickase]-[optional linker sequence]-[cytosine deaminase]-[optional linker sequence]-[UGI]; or
[Cas9 nickase]-[optional linker sequence]-[UGI]-[optional linker sequence]-[cytosine deaminase].

[0189] In some embodiments, fusion proteins provided herein further comprise a nuclear localization sequence (NLS). In some embodiments, the NLS is fused to the N-terminus of the fusion protein. In some embodiments, the NLS is fused to the C-terminus of the fusion protein. In some embodiments, the NLS is fused to the N-terminus of the UGI protein. In some embodiments, the NLS is fused to the C-terminus of the UGI protein. In some embodiments, the NLS is fused to the N-terminus of the guide nucleotide sequence-programmable DNA-binding protein domain. In some embodiments, the NLS is fused to the C-terminus of the guide nucleotide sequence-programmable DNA-binding protein domain. In some embodiments, the NLS is fused to the N-terminus of the cytosine deaminase. In some embodiments, the NLS is fused to the C-terminus of the deaminase. In some embodiments, the NLS is fused to the fusion protein via one or more linkers. In some embodiments, the NLS is fused to the fusion protein without a linker. Non-limiting, exemplary NLS sequences may be PKKKRKV (SEQ ID NO: 296) or MDSLLMNRRKFLYQFKNVRWAKGRRETYLC (SEQ ID NO: 297).

[0190] Some aspects of the present disclosure provide nucleobase editors that are capable of editing target C bases and convert the C bases to T bases. As such, a base editor may be a cytosine deaminase-dCas9 fusion protein. In some embodiments, the base editor may be a deaminase-dCas9-UGI fusion protein. In some embodiments, the base editor may be a APOBEC1-dCas9-UGI fusion protein. In some embodiments, the base editor may be APOBEC1-Cas9 nickase-UGI fusion protein. In some embodiments, the base editor may be APOBEC1-dCpf1-UGI fusion protein. In some embodiments, the base editor may be APOBEC1-dNgAgo-UGI fusion protein. In some embodiments, the base editor may be a pmCDA1-Cas9 nickase-UGI fusion protein. In some embodimetns, the base editor may be a human APOBEC3G-Cas9 nickase UGI fusion protein. Non-limiting exemplary sequences of the nucleobase editors described herein are provided in Example 1, SEQ ID NOs: 291-295 and 382-386. Such nucleobase editors and methods of using them for genome editing have been described in the art, e.g., in U.S. Pat. No. 9,068,179, US Patent Application Publications US20150166980, US20150166981, US20150166982, US20150166984, and US20150165054, and U.S. Provisional Applications, 62/245,828, 62/279,346, 62/311,763, 62/322,178, and 62/357,352, and 62/370,700, 62/398,490, 62/498,686, PCT Application NO. PCT/US2016/058344, U.S. patent application Ser. No. 15/331,852, and in Komor et al., Programmable editing of a target base in genomic DNA without double-stranded DNA cleavage, Nature, 533(7603):420-4, 2016, the entire contents of each of which are incorporated herein by reference.

[0191] In some embodiments, the nucleobase editor comprises the amino acid sequence of any one of SEQ ID NOs: 291-295 and 382-386. In some embodiments, the nucleobase editor comprises an amino acid sequence that is at least about 70% identical, at least about 80% identical, at least about 90% identical, at least about 95% identical, at least about 96% identical, at least about 97% identical, at least about 98% identical, at least about 99% identical, at least about 99.5% identical, or at least about 99.9% to any one of SEQ ID NOs: 291-295 and 382-386. In some embodiments, the nucleobase editor consists of the amino acid sequence of any one of SEQ ID NO: 291-295 and 382-386.

[0192] Some aspects of the present disclosure provide nucleobase editors described herein associated with a guide nucleotide sequence (e.g., a guide RNA or gRNA). gRNAs can exist as a complex of two or more RNAs, or as a single RNA molecule. gRNAs that exist as a single RNA molecule may be referred to as single-guide RNAs (sgRNAs), though “gRNA” is used interchangeably to refer to guide RNAs that exist as either single molecules or as a complex of two or more molecules. Typically, gRNAs that exist as single RNA species comprise two domains: (1) a domain that shares homology to a target nucleic acid (e.g., and directs binding of a Cas9 complex to the target); and (2) a domain that binds a Cas9 protein. In some embodiments, domain (2) corresponds to a sequence known as a tracrRNA, and comprises a stem-loop structure. For example, in some embodiments, domain (2) is identical or homologous to a tracrRNA as provided in Jinek et al., Science 337:816-821(2012), the entire contents of which is incorporated herein by reference. Other examples of gRNAs (e.g., those including domain 2) can be found in U.S. Provisional Patent Application, U.S. Ser. No. 61/874,682, filed Sep. 6, 2013, entitled “Switchable Cas9 Nucleases And Uses Thereof,” and U.S. Provisional Patent Application, U.S. Ser. No. 61/874,746, filed Sep. 6, 2013, entitled “Delivery System For Functional Nucleases,” the entire contents of each are hereby incorporated by reference in their entirety. In some embodiments, a gRNA comprises two or more of domains (1) and (2), and may be referred to as an “extended gRNA.” For example, an extended gRNA will, e.g., bind two or more RNA guided-programmable DNA-binding proteins and bind a target nucleic acid at two or more distinct regions, as described herein. The gRNA comprises a nucleotide sequence that complements a target site, which mediates binding of the nuclease/RNA complex to said target site, providing the sequence specificity of the nuclease:RNA complex. These proteins are able to be targeted, in principle, to any sequence specified by the guide RNA. Methods of using RNA-programmable nucleases, such as Cas9, for site-specific cleavage (e.g., to modify a genome) are known in the art (see e.g., Cong, L. et al. Science 339, 819-823 (2013); Mali, P. et al. Science 339, 823-826 (2013); Hwang, W. Y. et al. Nature biotechnology 31, 227-229 (2013); Jinek, M. et al. eLife 2, e00471 (2013); Dicarlo, J. E. et al. Nucleic acids research (2013); Jiang, W. et al. Nature biotechnology 31, 233-239 (2013); the entire contents of each of which are incorporated herein by reference). In particular, examples of guide nucleotide sequences (e.g., sgRNAs) that may be used to target the nucleobase editors of the present disclosure to its target sequence to deaminate the targeted C bases are described in Komor et al., Programmable editing of a target base in genomic DNA without double-stranded DNA cleavage, Nature, 533(7603):420-4, 2016, the entire contents of which are incorporated herein by reference. It is to be understood that co-expression of the nucleobase editors with an sgRNA results in targeting of the nucleobase editor to the target sequence.

[0193] The specific structure of the guide nucleotide sequences depends on its target sequence and the relative distance of a PAM sequence downstream of the target sequence. One skilled in the art will understand, that no unifying guide nucleotide sequence structure may be given, for that the target sequences are not the same for each and every C targeted to be deaminated.

[0194] The present disclosure further provides guidance in how to design the guide nucleotide sequence (e.g., an sgRNA) so that one skilled in the art may use such teaching to a target sequence of interest. A guide RNA typically comprises a tracrRNA framework allowing for Cas9 binding, and a guide sequence, which confers sequence specificity to fusion proteins disclosed herein. In some embodiments, the guide RNA comprises a structure 5′-[guide sequence]-guuuuagagcuagaaauagcaaguuaaaauaaaggcuaguccguuaucaacuugaaaaaguggcaccgagucggugcuu uuu-3′ (SEQ ID NO: 366), wherein the guide sequence comprises a sequence that is complementary to the target sequence. The guide sequence is typically 20 nucleotides long. Such suitable guide RNA sequences typically comprise guide sequences that are complementary to a nucleic sequence within 50 nucleotides upstream or downstream of the target nucleotide to be edited.

[0195] In some embodiments, the guide RNA is about 15-100 nucleotides long and comprises a sequence of at least 10 contiguous nucleotides that is complementary to a target sequence. In some embodiments, the guide RNA is 15, 16, 17, 18, 19, 20, 21, 22, 23, 24, 25, 26, 27, 28, 29, 30, 31, 32, 33, 34, 35, 36, 37, 38, 39, 40, 41, 42, 43, 44, 45, 46, 47, 48, 49, or 50 nucleotides long. In some embodiments, the guide RNA comprises a sequence of 15, 16, 17, 18, 19, 20, 21, 22, 23, 24, 25, 26, 27, 28, 29, 30, 31, 32, 33, 34, 35, 36, 37, 38, 39, or 40 contiguous nucleotides that is complementary to a target sequence. Non-limiting, exemplary gRNA sequences used for introducing nonsense codons into the coding sequence of BRD5 are provided in Example 4, SEQ ID NOs: 367-370. Non-limiting, exemplary gRNA sequences used for introducing nonsense codons into the coding sequence PRSS2 are provided in Example 4, SEQ ID NOs: 371-373.

### Host Cells and Organisms

[0196] Other aspects of the present disclosure provide host cells and organisms for the in vivo incorporation of an unnatural amino acid via orthogonal tRNA/RS pairs. Host cells are genetically engineered to express the nucleobase editors and components of the translation system described herein. In some embodiments, host cells comprise vectors encoding the nucleobase editors and components of the translation system (e.g., transformed, transduced, or transfected), which can be, for example, a cloning vector or an expression vector. The vector can be, for example, in the form of a plasmid, a bacterium, a virus, a naked polynucleotide, or a conjugated polynucleotide. The vectors are introduced into cells and/or microorganisms by standard methods including electroporation, infection by viral vectors, high velocity ballistic penetration by small particles with the nucleic acid either within the matrix of small beads or particles, or on the surface (Klein et al., Nature 327, 70-73 (1987)). In some embodiments, the host cell is a prokaryotic cell. In some embodiments, the host cell is a eukaryotic cell. In some embodiments, the host cell is a bacterial cell. In some embodiments, the host cell is a yeast cell. In some embodiments, the host cell is a mammalian cell. In some embodiments, the host cell is a human cell. In some embodiments, the host cell is a cultured cell. In some embodiments, the host cell is within a tissue or an organism.

[0197] The engineered host cells can be cultured in conventional nutrient media modified as appropriate for such activities as, for example, screening steps, activating promoters or selecting transformants. These cells can optionally be cultured into transgenic organisms.

[0198] Several well-known methods of introducing target nucleic acids into bacterial cells are available, any of which can be used in the present disclosure. These include: fusion of the recipient cells with bacterial protoplasts containing the DNA, electroporation, projectile bombardment, and infection with viral vectors (discussed further, below), etc. Bacterial cells can be used to amplify the number of plasmids containing DNA constructs of the present disclosure. The bacteria are grown to log phase and the plasmids within the bacteria can be isolated by a variety of methods known in the art (see, for instance, Sambrook). In addition, a plethora of kits are commercially available for the purification of plasmids from bacteria, (see, e.g., EasyPrep™, FlexiPrep™, both from Pharmacia Biotech; StrataClean™, from Stratagene; and, QIAprep™ from Qiagen). The isolated and purified plasmids are then further manipulated to produce other plasmids, used to transfect cells or incorporated into related vectors to infect organisms. Typical vectors contain transcription and translation terminators, transcription and translation initiation sequences, and promoters useful for regulation of the expression of the particular target nucleic acid. The vectors optionally comprise generic expression cassettes containing at least one independent terminator sequence, sequences permitting replication of the cassette in eukaryotes, or prokaryotes, or both, (e.g., shuttle vectors) and selection markers for both prokaryotic and eukaryotic systems. Vectors are suitable for replication and integration in prokaryotes, eukaryotes, or preferably both. See, Giliman & Smith, Gene 8:81 (1979); Roberts, et al., Nature, 328:731 (1987); and Schneider, B., et al., Protein Expr. Purifi 6435:10 (1995)).

[0199] Bacteriophages useful for cloning is provided, e.g., by the ATCC, e.g., The ATCC Catalogue of Bacteria and Bacteriophage (1992) Gherna et al. (eds) published by the ATCC. Additional basic procedures for sequencing, cloning and other aspects of molecular biology and underlying theoretical considerations are also found in Watson et al. (1992) Recombinant DNA Second Edition Scientific American Books, NY.

[0200] Other useful references, e.g. for cell isolation and culture (e.g., for subsequent nucleic acid isolation) include Freshney (1994) Culture of Animal Cells, a Manual of Basic Technique, third edition, Wiley-Liss, New York and the references cited therein; Payne et al. (1992) Plant Cell and Tissue Culture in Liquid Systems John Wiley & Sons, Inc. New York, N.Y.; Gamborg and Phillips (eds) (1995) Plant Cell. Tissue and Organ Culture; Fundamental Methods Springer Lab Manual, Springer-Verlag (Berlin Heidelberg New York) and Atlas and Parks (eds) The Handbook of Microbiological Media (1993) CRC Press, Boca Raton, Fla.

[0201] In addition, essentially any nucleic acid (and virtually any labeled nucleic acid, whether standard or non-standard) can be custom or standard ordered from any of a variety of commercial sources, such as The Midland Certified Reagent Company (mcrc@oligos.com), The Great American Gene Company (www.genco.com), ExpressGen Inc. (www.expressgen.com), Operon Technologies Inc. (Alameda, Calif.), and many others.

### Kits

[0202] Further provided herein are kits for the incorporation of unnatural amino acids into proteins using the systems, compositions, and methods described herein. In some embodiments, the kit comprises nucleic acid vectors for the expression of the nucleobase editors described herein. In some embodiments, the kit further comprises appropriate guide nucleotide sequences (e.g., gRNAs) or nucleic acid vectors for the expression of such guide nucleotide sequences, to target the nucleobase editors to the target sequences. In some embodiments, the kit further comprises nucleic acid vectors expressing the translation system described herein. In some embodiments, the kit comprises nucleic acid vectors expressing the OtRNA or the ORS described herein. In some embodiments, the kit is suitable for in vitro incorporation of unnatural amino acids into a protein. As such, the kit further comprises components of the translation machinery as described herein. In some embodiments, the protein components in an in vitro translation system are in the form of isolated proteins. In some embodiments, the components of translation machinery for an in vitro translation system are provided in a cell extract/cell lysate. In some embodiments, the components for an in vitro translation system comprises at least isolated RNA polymerases, isolated translation initiation factor, isolated ribosomes, isolated release factor-1, isolated release factor-2, isolated release factor-3, ATPs, GTPs, CTPs, UTPs, isolated elongation factor-Tu, natural aminoacyl-tRNA synthetases, natural tRNAs, or natural amino acids. In some embodiments, the kit further comprises one or more unnatural amino acids (e.g., 1, 2, 3, 4, 5, 6, 7, 8, 9, 10, 11, 12, 13, 14, 15, or more).

[0203] The kit described herein may include one or more containers housing components for performing the methods described herein and optionally instructions of uses. Any of the kit described herein may further comprise components needed for performing the assay methods. Each component of the kits, where applicable, may be provided in liquid form (e.g., in solution), or in solid form, (e.g., a dry powder). In certain cases, some of the components may be reconstitutable or otherwise processible (e.g., to an active form), for example, by the addition of a suitable solvent or other species (for example, water or certain organic solvents), which may or may not be provided with the kit.

[0204] In some embodiments, the kits may optionally include instructions and/or promotion for use of the components provided. As used herein, “instructions” can define a component of instruction and/or promotion, and typically involve written instructions on or associated with packaging of the disclosure. Instructions also can include any oral or electronic instructions provided in any manner such that a user will clearly recognize that the instructions are to be associated with the kit, for example, audiovisual (e.g., videotape, DVD, etc.), Internet, and/or web-based communications, etc. The written instructions may be in a form prescribed by a governmental agency regulating the manufacture, use, or sale of pharmaceuticals or biological products, which can also reflect approval by the agency of manufacture, use or sale for animal administration. As used herein, “promoted” includes all methods of doing business including methods of education, hospital and other clinical instruction, scientific inquiry, drug discovery or development, academic research, pharmaceutical industry activity including pharmaceutical sales, and any advertising or other promotional activity including written, oral and electronic communication of any form, associated with the disclosure. Additionally, the kits may include other components depending on the specific application, as described herein.

[0205] The kits may contain any one or more of the components described herein in one or more containers. The components may be prepared sterilely, packaged in a syringe and shipped refrigerated. Alternatively it may be housed in a vial or other container for storage. A second container may have other components prepared sterilely. Alternatively the kits may include the active agents premixed and shipped in a vial, tube, or other container.

[0206] The kits may have a variety of forms, such as a blister pouch, a shrink wrapped pouch, a vacuum sealable pouch, a sealable thermoformed tray, or a similar pouch or tray form, with the accessories loosely packed within the pouch, one or more tubes, containers, a box or a bag. The kits may be sterilized after the accessories are added, thereby allowing the individual accessories in the container to be otherwise unwrapped. The kits can be sterilized using any appropriate sterilization techniques, such as radiation sterilization, heat sterilization, or other sterilization methods known in the art. The kits may also include other components, depending on the specific application, for example, containers, cell media, salts, buffers, reagents, syringes, needles, a fabric, such as gauze, for applying or removing a disinfecting agent, disposable gloves, a support for the agents prior to administration, etc.

[0207] Without further elaboration, it is believed that one skilled in the art can, based on the above description, utilize the present disclosure to its fullest extent. The following specific embodiments are, therefore, to be construed as merely illustrative, and not limitative of the remainder of the disclosure in any way whatsoever. All publications cited herein are incorporated by reference for the purposes or subject matter referenced herein.

### EXAMPLES

[0208] In order that the disclosure described herein may be more fully understood, the following examples are set forth. The synthetic examples described in this application are offered to illustrate the compounds and methods provided herein and are not to be construed in any way as limiting their scope.

### Example 1: Guide Nucleotide Sequence Programmable DNA-Binding Protein Domains, Deaminases, and Base Editors

[0209] Non-limiting examples of suitable guide nucleotide sequence-programmable DNA-binding protein domain s are provided. The disclosure provides Cas9 variants, for example, Cas9 proteins from one or more organisms, which may comprise one or more mutations (e.g., to generate dCas9 or Cas9 nickase). In some embodiments, one or more of the amino acid residues, identified below by an asterek, of a Cas9 protein may be mutated. In some embodiments, the D10 and/or H840 residues of the amino acid sequence provided in SEQ ID NO: 1, or a corresponding mutation in any of the amino acid sequences provided in SEQ ID NOs: 11-260, are mutated. In some embodiments, the D10 residue of the amino acid sequence provided in SEQ ID NO: 1, or a corresponding mutation in any of the amino acid sequences provided in SEQ ID NOs: 11-260, is mutated to any amino acid residue, except for D. In some embodiments, the D10 residue of the amino acid sequence provided in SEQ ID NO: 1, or a corresponding mutation in any of the amino acid sequences provided in SEQ ID NOs: 11-260, is mutated to an A. In some embodiments, the H840 residue of the amino acid sequence provided in SEQ ID NO: 1, or a corresponding residue in any of the amino acid sequences provided in SEQ ID NOs: 11-260, is an H. In some embodiments, the H840 residue of the amino acid sequence provided in SEQ ID NO: 1, or a corresponding mutation in any of the amino acid sequences provided in SEQ ID NOs: 11-260, is mutated to any amino acid residue, except for H. In some embodiments, the H840 residue of the amino acid sequence provided in SEQ ID NO: 1, or a corresponding mutation in any of the amino acid sequences provided in SEQ ID NOs: 11-260, is mutated to an A. In some embodiments, the D10 residue of the amino acid sequence provided in SEQ ID NO: 1, or a corresponding residue in any of the amino acid sequences provided in SEQ ID NOs: 11-260, is mutated to A, and the H840 residue of the amino acid sequence provided in SEQ ID NO: 1, or a corresponding residue in any of the amino acid sequences provided in SEQ ID NOs: 11-260, is an H.

[0210] A number of Cas9 sequences from various species were aligned to determine whether corresponding homologous amino acid residues of D10 and H840 of SEQ ID NO: 1 can be identified in other Cas9 proteins, allowing the generation of Cas9 variants with corresponding mutations of the homologous amino acid residues. The alignment was carried out using the NCBI Constraint-based Multiple Alignment Tool (COBALT(accessible at st-va.ncbi.nlm.nih.gov/tools/cobalt), with the following parameters. Alignment parameters: Gap penalties −11,−1; End-Gap penalties −5,−1. CDD Parameters: Use RPS BLAST on; Blast E-value 0.003; Find Conserved columns and Recompute on. Query Clustering Parameters: Use query clusters on; Word Size 4; Max cluster distance 0.8; Alphabet Regular.

[0211] An exemplary alignment of four Cas9 sequences is provided below. The Cas9 sequences in the alignment are: Sequence 1 (S1): SEQ ID NO: 11|WP_010922251|gi 499224711|type II CRISPR RNA-guided endonuclease Cas9 [Streptococcus pyogenes]; Sequence 2 (S2): SEQ ID NO: 12|WP_039695303|gi 746743737|type II CRISPR RNA-guided endonuclease Cas9 [Streptococcus gallolyticus]; Sequence 3 (S3): SEQ ID NO: 13|WP_045635197|gi 782887988|type II CRISPR RNA-guided endonuclease Cas9 [Streptococcus mitis]; Sequence 4 (S4): SEQ ID NO: 14|5AXW_A|gi 924443546|Staphylococcus Aureus Cas9. The HNH domain (bold and underlined) and the RuvC domain (boxed) are identified for each of the four sequences. Amino acid residues 10 and 840 in 51 and the homologous amino acids in the aligned sequences are identified with an asterisk following the respective amino acid residue.

| | | | |
|---|---|---|---|
| S1 | 1 | --MDKK-YSIGLD*IGTNSVGWAVITDEYKVESKKFKVLGNTDRHSIKKNLI--GALLFDSG--ETAEATRLKRTARRRYT | 73 |
| S2 | 1 | --MTKKNYSIGLD*IGTNSVGWAVITDDYKVPAKKMKVLGNTDKKYIKKNLL--GALLFDSG--ETAEATRLKRTARRRYT | 74 |
| S3 | 1 | --M-KKGYSIGLD*IGTNSVGFAVITDDYKVPSKKMKVLGNTDKRFIKKNLI--GALLFDEG--TTAEARRLKRTARRRYT | 73 |
| S4 | 1 | GSHMKRNYILGLD*IGITSVGYGII--DYET-----------------RDVIDAGVRLFKEANVENNEGRRSKRGARRLKR | 61 |
| S1 | 74 | RRKNRICYLQEIFSNEMAKVDDSFFHRLEESFLVEEDKKHERHPIFGNIVDEVAYHEKYPTIYHLRKKLVDSTDKADLRL | 153 |
| S2 | 75 | RRKNRLRYLQEIFANEIAKVDESFFQRLDESFLTDDDKTFDSHPIFGNKAEEDAYHQKFPTIYHLRKHLADSSEKADLRL | 154 |
| S3 | 74 | RRKNRLRYLQEIFSEEMSKVDSSFFHRLDDSFLIPEDKRESKYPIFATLTEEKEYHKQFPTIYHLRKQLADSKEKTDLRL | 153 |
| S4 | 62 | RRRHRIQRVKKLL--------------FDYNLLTD--------------------HSELSGINPYEARVKGLSQKLSEEE | 107 |
| S1 | 154 | IYLALAHMIKFRGHFLIEGDLNPDNSDVDKLFIQLVQTYNQLFEENPINASGVDAKAILSARLSKSRRLENLIAQLPGEK | 233 |
| S2 | 155 | VYLALAHMIKFRGHFLIEGELNAENTDVQKIFADFVGVYNRTFDDSHLSEITVDVASILTEKISKSRRLENLIKYYPTEK | 234 |
| S3 | 154 | IYLALAHMIKYRGHFLYEEAFDIKNNDIQKIFNEFISIYDNTFEGSSLSGQNAQVEAIFTDKISKSAKRERVLKLFPDEK | 233 |
| S4 | 108 | FSAALLHLAKRRG----------------------VHNVNEVEEDT---------------------------------- | 131 |
| S1 | 234 | KNGLFGNLIALSLGLTPNFKSNFDLAEDAKLQLSKDTYDDDLDNLLAQIGDQYADLFLAAKNLSDAILLSDILRVNTEIT | 313 |
| S2 | 235 | KNTLFGNLIALALGLQPNFKTNFKLSEDAKLQFSKDTYEEDLEELLGKIGDDYADLFTSAKNLYDAILLSGILTVDDNST | 314 |
| S3 | 234 | STGLFSEFLKLIVGNQADFKKHFDLEDKAPLQFSKDTYDEDLENLLGQIGDDFTDLFVSAKKLYDAILLSGILTVTDPST | 313 |
| S4 | 132 | -----GNELS------------------TKEQISRN-------------------------------------------- | 144 |
| S1 | 314 | KAPLSASMIKRYDEHHQDLTLLKALVRQQLPEKYKEIFFDQSKNGYAGYIDGGASQEEFYKFIKPILEKM--DGTEELLV | 391 |
| S2 | 315 | KAPLSASMIKRYVEHHEDLEKLKEFIKANKSELYHDIFKDKNKNGYAGYIENGVKQDEFYKYLKNILSKIKIDGSDYFLD | 394 |
| S3 | 314 | KAPLSASMIERYENHQNDLAALKQFIKNNLPEKYDEVFSDQSKDGYAGYIDGKTTQETFYKYIKNLLSKF--EGTDYFLD | 391 |
| S4 | 145 | ----SKALEEKYVAELQ-------------------------------------------------LERLKKDG------ | 165 |
| S1 | 392 | KLNREDLLRKQRTFDNGSIPHQIHLGELHAILRRQEDFYPFLKDNREKIEKILTFRIPYYVGPLARGNSRFAWMTRKSEE | 471 |
| S2 | 395 | KIEREDFLRKQRTFDNGSIPHQIHLQEMHAILRRQGDYYPFLKEKQDRIEKILTFRIPYYVGPLVRKDSRFAWAEYRSDE | 474 |
| S3 | 392 | KIEREDFLRKQRTFDNGSIPHQIHLQEMNAILRRQGEYYPFLKDNKEKIEKILTFRIPYYVGPLARGNRDFAWLTRNSDE | 471 |
| S4 | 166 | --EVRGSINRFKTSD--------YVKEAKQLLKVQKAYHQLDQSFIDTYIDLLETRRTYYEGP--GEGSPFGW------K | 227 |
| S1 | 472 | TITPWNFEEVVDKGASAQSFIERMTNFDKNLPNEKVLPKHSLLYEYFTVYNELTKVKYVTEGMRKPAFLSGEQKKAIVDL | 551 |
| S2 | 475 | KITPWNFDKVIDKEKSAEKFITRMTLNDLYLPEEKVLPKHSHVYETYAVYNELTKIKYVNEQGKE-SFFDSNMKQEIFDH | 553 |
| S3 | 472 | AIRPWNFEEIVDKASSAEDFINKMTNYDLYLPEEKVLPKHSLLYETFAVYNELTKVKFIAEGLRDYQFLDSGQKKQIVNQ | 551 |
| S4 | 228 | DIKEW---------------YEMLMGHCTYFPEELRSVKYAYNADLYNALNDLNNLVITRDENEK---LEYYEKFQIIEN | 289 |
| S1 | 552 | LFKTNRKVTVKQLKEDYFKKIECFDSVEISGVEDR---FNASLGTYHDLLKIIKDKDFLDNEENEDILEDIVLTLTLFED | 628 |
| S2 | 554 | VFKENRKVTKEKLLNYLNKEFPEYRIKDLIGLDKENKSFNASLGTYHDLKKIL-DKAFLDDKVNEEVIEDIIKTLTLFED | 632 |
| S3 | 552 | LFKENRKVTEKDIIHYLHN-VDGYDGIELKGIEKQ---FNASLSTYHDLLKIIKDKEFMDDAKNEAILENIVHTLTIFED | 627 |
| S4 | 290 | VFKQKKKPTLKQIAKEILVNEEDIKGYRVTSTGKPEF---TNLKVYHDIKDITARKEII---ENAELLDQIAKILTIYQS | 363 |
| S1 | 629 | REMIEERLKTYAHLFDDKVMKQLKR-RRYTGWGRLSRKLINGIRDKQSGKTILDFLKSDGFANRNFMQLIHDDSLTFKED | 707 |
| S2 | 633 | KDMIHERLQKYSDIFTANQLKKLER-RHYTGWGRLSYKLINGIRNKENNKTILDYLIDDGSANRNFMQLINDDTLPFKQI | 711 |
| S3 | 628 | REMIKQRLAQYDSLFDEKVIKALTR-RHYTGWGKLSAKLINGICDKQTGNTILDYLIDDGKINRNFMQLINDDGLSFKEI | 706 |
| S4 | 364 | SEDIQEELTNLNSELTQEEIEQISNLKGYTGTHNLSLKAINLILDE------LWHTNDNQIAIFNRLKLVP--------- | 428 |
| S1 | 708 | [chemical structure] | 781 |
| S2 | 712 | [chemical structure] | 784 |
| S3 | 707 | [chemical structure] | 779 |
| S4 | 429 | [chemical structure] | 505 |
| S1 | 782 | KRIEEGIKELGSQIL-------KEHPVENTQLQNEKLYLYYLQNGRDMYVDQELDINRLSD----YDVDH*IVPQSFLKDD | 850 |
| S2 | 785 | KKLQNSLKELGSNILNEEKPSYIEDKVENSHLQNDQLFLYYIQNGKDMYTGDELDIDHLSD----YDIDH*IIPQAFIKDD | 860 |
| S3 | 780 | KRIEDSLKILASGL---DSNILKENPTDNNQLQNDRLFLYYLQNGKDMYTGEALDINQLSS----YDIDH*IIPQAFIKDD | 852 |
| S4 | 506 | ERIEEIIRTTGK---------------ENAKYLIEKIKLHDMQEGKCLYSLEAIPLEDLLNNPFNYEVDH*IIPRSVSFDN | 570 |
| S1 | 851 | [chemical structure] | 922 |
| S2 | 861 | [chemical structure] | 932 |
| S3 | 853 | [chemical structure] | 924 |
| S4 | 571 | [chemical structure] | 650 |
| S1 | 923 | [chemical structure] | 1002 |
| S2 | 933 | [chemical structure] | 1012 |
| S3 | 925 | [chemical structure] | 1004 |
| S4 | 651 | [chemical structure] | 712 |
| S1 | 1003 | [chemical structure] | 1077 |
| S2 | 1013 | [chemical structure] | 1083 |
| S3 | 1005 | [chemical structure] | 1081 |
| S4 | 713 | [chemical structure] | 764 |
| S1 | 1078 | [chemical structure] | 1149 |
| S2 | 1084 | [chemical structure] | 1158 |
| S3 | 1082 | [chemical structure] | 1156 |
| S4 | 765 | [chemical structure] | 835 |
| S1 | 1150 | EKGKSKKLKSVKELLGITIMERSSFEKNPI-DFLEAKG-----YKEVKKDLIIKLPKYSLFELENGRKRMLASAGELQKG | 1223 |
| S2 | 1159 | EKGKAKKLKTVKELVGISIMERSFFEENPV-EFLENKG-----YHNIREDKLIKLPKYSLFEFEGGRRRLLASASELQKG | 1232 |
| S3 | 1157 | EKGKAKKLKTVKTLVGITIMEKAAFEENPI-TFLENKG-----YHNVRKENILCLPKYSLFELENGRRRLLASAKELQKG | 1230 |
| S4 | 836 | DPQTYQKLK--------LIMEQYGDEKNPLYKYYEETGNYLTKYSKKDNGPVIKKIKYYGNKLNAHLDITDDYPNSRNKV | 907 |
| S1 | 1224 | NELALPSKYVNFLYLASHYEKLKGSPEDNEQKQLFVEQHKHYLDEITEQISEFSKRVILADANLDKVLSAYNKH------ | 1297 |
| S2 | 1233 | NEMVLPGYLVELLYHAHRADNF-----NSTEYLNYVSEHKKEFEKVLSCVEDFANLYVDVEKNLSKIRAVADSM------ | 1301 |
| S3 | 1231 | NEIVLPVYLTTLLYHSKNVHKL-----DEPGHLEYIQKHRNEFKDLLNLVSEFSQKYVLADANLEKIKSLYADN------ | 1299 |
| S4 | 908 | VKLSLKPYRFD-VYLDNGVYKFV-----TVKNLDVIK--KENYYEVNSKAYEEAKKLKKISNQAEFIASFYNNDLIKING | 979 |
| S1 | 1298 | RDKPIREQAENIIHLFTLTNLGAPAAFKYFDTTIDRKRYTSTKEVLDATLIHQSIT--------GLYETRI----DLSQL | 1365 |
| S2 | 1302 | DNFSIEEISNSFINLLTLTALGAPADFNFLGEKIPRKRYTSTKECLNATLIHQSIT--------GLYETRI----DLSKL | 1369 |
| S3 | 1300 | EQADIEILANSFINLLTFTALGAPAAFKFFGKDIDRKRYTTVSEILNATLIHQSIT--------GLYETWI----DLSKL | 1367 |
| S4 | 980 | ELYRVIGVNNDLLNRIEVNMIDITYR-EYLENMNDKRPPRIIKTIASKT---QSIKKYSTDILGNLYEVKSKKHPQIIKK | 1055 |
| S1 | 1366 | GGD | 1368 |
| S2 | 1370 | GEE | 1372 |
| S3 | 1368 | GED | 1370 |
| S4 | 1056 | G-- | 1056 |

[0212] The alignment demonstrates that amino acid sequences and amino acid residues that are homologous to a reference Cas9 amino acid sequence or amino acid residue can be identified across Cas9 sequence variants, including, but not limited to Cas9 sequences from different species, by identifying the amino acid sequence or residue that aligns with the reference sequence or the reference residue using alignment programs and algorithms known in the art. This disclosure provides Cas9 variants in which one or more of the amino acid residues identified by an asterisk in SEQ ID NOs: 11-14 (e.g., 51, S2, S3, and S4, respectively) are mutated as described herein. The residues D10 and H840 in Cas9 of SEQ ID NO: 1 that correspond to the residues identified in SEQ ID NOs: 11-14 by an asterisk are referred to herein as “homologous” or “corresponding” residues. Such homologous residues can be identified by sequence alignment, e.g., as described above, and by identifying the sequence or residue that aligns with the reference sequence or residue. Similarly, mutations in Cas9 sequences that correspond to mutations identified in SEQ ID NO: 1 herein, e.g., mutations of residues 10, and 840 in SEQ ID NO: 11-14, are referred to herein as “homologous” or “corresponding” mutations. For example, the mutations corresponding to the D10A mutation in SEQ ID NO: 1 or 51 (SEQ ID NO: 11) for the four aligned sequences above are D11A for S2, D10A for S3, and D13A for S4; the corresponding mutations for H840A in SEQ ID NO: 1 or 51 (SEQ ID NO: 11) are H850A for S2, H842A for S3, and H560A for S4.

[0213] A total of 250 Cas9 sequences (SEQ ID NOs: 11-260) from different species are provided. Amino acid residues homologous to residues 10, and 840 of SEQ ID NO: 1 may be identified in the same manner as outlined above. All of these Cas9 sequences may be used in accordance with the present disclosure.

WP_010922251.1type II CRISPR RNA-guided endonuclease Cas9 [Streptococcus pyogenes] SEQ ID NO: 11
WP_039695303.1type II CRISPR RNA-guided endonuclease Cas9 [Streptococcus gallolyticus] SEQ ID NO: 12
WP_045635197.1type II CRISPR RNA-guided endonuclease Cas9 [Streptococcus mitis] SEQ ID NO: 13

### 5AXW_A Cas9, Chain A, Crystal Structure [Staphylococcus Aureus] SEQ ID NO: 14

[0214] WP_009880683.1type II CRISPR RNA-guided endonuclease Cas9 [Streptococcus pyogenes] SEQ ID NO: 15
WP_010922251.1type II CRISPR RNA-guided endonuclease Cas9 [Streptococcus pyogenes] SEQ ID NO: 16
WP_011054416.1type II CRISPR RNA-guided endonuclease Cas9 [Streptococcus pyogenes] SEQ ID NO: 17
WP_011284745.1type II CRISPR RNA-guided endonuclease Cas9 [Streptococcus pyogenes] SEQ ID NO: 18
WP_011285506.1type II CRISPR RNA-guided endonuclease Cas9 [Streptococcus pyogenes] SEQ ID NO: 19
WP_011527619.1type II CRISPR RNA-guided endonuclease Cas9 [Streptococcus pyogenes] SEQ ID NO: 20
WP_012560673.1type II CRISPR RNA-guided endonuclease Cas9 [Streptococcus pyogenes] SEQ ID NO: 21
WP_014407541.1type II CRISPR RNA-guided endonuclease Cas9 [Streptococcus pyogenes] SEQ ID NO: 22
WP_020905136.1type II CRISPR RNA-guided endonuclease Cas9 [Streptococcus pyogenes] SEQ ID NO: 23
WP_023080005.1type II CRISPR RNA-guided endonuclease Cas9 [Streptococcus pyogenes] SEQ ID NO: 24
WP_023610282.1type II CRISPR RNA-guided endonuclease Cas9 [Streptococcus pyogenes] SEQ ID NO: 25
WP_030125963.1type II CRISPR RNA-guided endonuclease Cas9 [Streptococcus pyogenes] SEQ ID NO: 26
WP_030126706.1type II CRISPR RNA-guided endonuclease Cas9 [Streptococcus pyogenes] SEQ ID NO: 27
WP_031488318.1type II CRISPR RNA-guided endonuclease Cas9 [Streptococcus pyogenes] SEQ ID NO: 28
WP_032460140.1type II CRISPR RNA-guided endonuclease Cas9 [Streptococcus pyogenes] SEQ ID NO: 29
WP_032461047.1type II CRISPR RNA-guided endonuclease Cas9 [Streptococcus pyogenes] SEQ ID NO: 30
WP_032462016.1type II CRISPR RNA-guided endonuclease Cas9 [Streptococcus pyogenes] SEQ ID NO: 31
WP_032462936.1type II CRISPR RNA-guided endonuclease Cas9 [Streptococcus pyogenes] SEQ ID NO: 32
WP_032464890.1type II CRISPR RNA-guided endonuclease Cas9 [Streptococcus pyogenes] SEQ ID NO: 33
WP_033888930.1type II CRISPR RNA-guided endonuclease Cas9 [Streptococcus pyogenes] SEQ ID NO: 34
WP_038431314.1type II CRISPR RNA-guided endonuclease Cas9 [Streptococcus pyogenes] SEQ ID NO: 35
WP_038432938.1type II CRISPR RNA-guided endonuclease Cas9 [Streptococcus pyogenes] SEQ ID NO: 36
WP_038434062.1type II CRISPR RNA-guided endonuclease Cas9 [Streptococcus pyogenes] SEQ ID NO: 37
BAQ51233.1 CRISPR-associated protein, Csn1 family [Streptococcus pyogenes] SEQ ID NO: 38
KGE60162.1 hypothetical protein MGAS2111_0903 [Streptococcus pyogenes MGAS2111] SEQ ID NO: 39
KGE60856.1 CRISPR-associated endonuclease protein [Streptococcus pyogenes SS1447] SEQ ID NO: 40
WP_002989955.1MULTISPECIES: type II CRISPR RNA-guided endonuclease Cas9 [Streptococcus] SEQ ID NO: 41
WP_003030002.1MULTISPECIES: type II CRISPR RNA-guided endonuclease Cas9 [Streptococcus] SEQ ID NO: 42
WP_003065552.1MULTISPECIES: type II CRISPR RNA-guided endonuclease Cas9 [Streptococcus] SEQ ID NO: 43
WP_001040076.1type II CRISPR RNA-guided endonuclease Cas9 [Streptococcus agalactiae] SEQ ID NO: 44
WP_001040078.1type II CRISPR RNA-guided endonuclease Cas9 [Streptococcus agalactiae] SEQ ID NO: 45
WP_001040080.1type II CRISPR RNA-guided endonuclease Cas9 [Streptococcus agalactiae] SEQ ID NO: 46
WP_001040081.1type II CRISPR RNA-guided endonuclease Cas9 [Streptococcus agalactiae] SEQ ID NO: 47
WP_001040083.1type II CRISPR RNA-guided endonuclease Cas9 [Streptococcus agalactiae] SEQ ID NO: 48
WP_001040085.1type II CRISPR RNA-guided endonuclease Cas9 [Streptococcus agalactiae] SEQ ID NO: 49
WP_001040087.1type II CRISPR RNA-guided endonuclease Cas9 [Streptococcus agalactiae] SEQ ID NO: 50
WP_001040088.1type II CRISPR RNA-guided endonuclease Cas9 [Streptococcus agalactiae] SEQ ID NO: 51
WP_001040089.1type II CRISPR RNA-guided endonuclease Cas9 [Streptococcus agalactiae] SEQ ID NO: 52
WP_001040090.1type II CRISPR RNA-guided endonuclease Cas9 [Streptococcus agalactiae] SEQ ID NO: 53
WP_001040091.1type II CRISPR RNA-guided endonuclease Cas9 [Streptococcus agalactiae] SEQ ID NO: 54
WP_001040092.1type II CRISPR RNA-guided endonuclease Cas9 [Streptococcus agalactiae] SEQ ID NO: 55
WP_001040094.1type II CRISPR RNA-guided endonuclease Cas9 [Streptococcus agalactiae] SEQ ID NO: 56
WP_001040095.1type II CRISPR RNA-guided endonuclease Cas9 [Streptococcus agalactiae] SEQ ID NO: 57
WP_001040096.1type II CRISPR RNA-guided endonuclease Cas9 [Streptococcus agalactiae] SEQ ID NO: 58
WP_001040097.1type II CRISPR RNA-guided endonuclease Cas9 [Streptococcus agalactiae] SEQ ID NO: 59
WP_001040098.1type II CRISPR RNA-guided endonuclease Cas9 [Streptococcus agalactiae] SEQ ID NO: 60
WP_001040099.1type II CRISPR RNA-guided endonuclease Cas9 [Streptococcus agalactiae] SEQ ID NO: 61
WP_001040100.1type II CRISPR RNA-guided endonuclease Cas9 [Streptococcus agalactiae] SEQ ID NO: 62
WP_001040104.1type II CRISPR RNA-guided endonuclease Cas9 [Streptococcus agalactiae] SEQ ID NO: 63
WP_001040105.1type II CRISPR RNA-guided endonuclease Cas9 [Streptococcus agalactiae] SEQ ID NO: 64
WP_001040106.1type II CRISPR RNA-guided endonuclease Cas9 [Streptococcus agalactiae] SEQ ID NO: 65
WP_001040107.1type II CRISPR RNA-guided endonuclease Cas9 [Streptococcus agalactiae] SEQ ID NO: 66
WP_001040108.1type II CRISPR RNA-guided endonuclease Cas9 [Streptococcus agalactiae] SEQ ID NO: 67
WP_001040109.1type II CRISPR RNA-guided endonuclease Cas9 [Streptococcus agalactiae] SEQ ID NO: 68
WP_001040110.1type II CRISPR RNA-guided endonuclease Cas9 [Streptococcus agalactiae] SEQ ID NO: 69
WP_015058523.1type II CRISPR RNA-guided endonuclease Cas9 [Streptococcus agalactiae] SEQ ID NO: 70
WP_017643650.1type II CRISPR RNA-guided endonuclease Cas9 [Streptococcus agalactiae] SEQ ID NO: 71
WP_017647151.1type II CRISPR RNA-guided endonuclease Cas9 [Streptococcus agalactiae] SEQ ID NO: 72
WP_017648376.1type II CRISPR RNA-guided endonuclease Cas9 [Streptococcus agalactiae] SEQ ID NO: 73
WP_017649527.1type II CRISPR RNA-guided endonuclease Cas9 [Streptococcus agalactiae] SEQ ID NO: 74
WP_017771611.1type II CRISPR RNA-guided endonuclease Cas9 [Streptococcus agalactiae] SEQ ID NO: 75
WP_017771984.1type II CRISPR RNA-guided endonuclease Cas9 [Streptococcus agalactiae] SEQ ID NO: 76
CFQ25032.1 CRISPR-associated protein [Streptococcus agalactiae] SEQ ID NO: 77
CFV16040.1 CRISPR-associated protein [Streptococcus agalactiae] SEQ ID NO: 78
KLJ37842.1 CRISPR-associated protein Csn1 [Streptococcus agalactiae] SEQ ID NO: 79
KLJ72361.1 CRISPR-associated protein Csn1 [Streptococcus agalactiae] SEQ ID NO: 80
KLL20707.1 CRISPR-associated protein Csn1 [Streptococcus agalactiae] SEQ ID NO: 81
KLL42645.1 CRISPR-associated protein Csn1 [Streptococcus agalactiae] SEQ ID NO: 82
WP_047207273.1type II CRISPR RNA-guided endonuclease Cas9 [Streptococcus agalactiae] SEQ ID NO: 83
WP_047209694.1type II CRISPR RNA-guided endonuclease Cas9 [Streptococcus agalactiae] SEQ ID NO: 84
WP_050198062.1type II CRISPR RNA-guided endonuclease Cas9 [Streptococcus agalactiae] SEQ ID NO: 85
WP_050201642.1type II CRISPR RNA-guided endonuclease Cas9 [Streptococcus agalactiae] SEQ ID NO: 86
WP_050204027.1type II CRISPR RNA-guided endonuclease Cas9 [Streptococcus agalactiae] SEQ ID NO: 87
WP_050881965.1type II CRISPR RNA-guided endonuclease Cas9 [Streptococcus agalactiae] SEQ ID NO: 88
WP_050886065.1type II CRISPR RNA-guided endonuclease Cas9 [Streptococcus agalactiae] SEQ ID NO: 89
AHN30376.1 CRISPR-associated protein Csn1 [Streptococcus agalactiae 138P] SEQ ID NO: 90
EA078426.1 reticulocyte binding protein [Streptococcus agalactiae H36B] SEQ ID NO: 91
CCW42055.1 CRISPR-associated protein, SAG0894 family [Streptococcus agalactiae ILRI112] SEQ ID NO:92
WP_003041502.1type II CRISPR RNA-guided endonuclease Cas9 [Streptococcus anginosus] SEQ ID NO: 93
WP_037593752.1type II CRISPR RNA-guided endonuclease Cas9 [Streptococcus anginosus] SEQ ID NO: 94
WP_049516684.1 CRISPR-associated protein Csn1 [Streptococcus anginosus] SEQ ID NO: 95
GAD46167.1 hypothetical protein ANG6_0662 [Streptococcus anginosus T5] SEQ ID NO: 96
WP_018363470.1type II CRISPR RNA-guided endonuclease Cas9 [Streptococcus caballi] SEQ ID NO: 97
WP_003043819.1type II CRISPR RNA-guided endonuclease Cas9 [Streptococcus canis] SEQ ID NO: 98
WP_006269658.1type II CRISPR RNA-guided endonuclease Cas9 [Streptococcus constellatus] SEQ ID NO: 99
WP_048800889.1type II CRISPR RNA-guided endonuclease Cas9 [Streptococcus constellatus] SEQ ID NO: 100
WP_012767106.1type II CRISPR RNA-guided endonuclease Cas9 [Streptococcus dysgalactiae] SEQ ID NO: 101
WP_014612333.1type II CRISPR RNA-guided endonuclease Cas9 [Streptococcus dysgalactiae] SEQ ID NO: 102
WP_015017095.1type II CRISPR RNA-guided endonuclease Cas9 [Streptococcus dysgalactiae] SEQ ID NO: 103
WP_015057649.1type II CRISPR RNA-guided endonuclease Cas9 [Streptococcus dysgalactiae] SEQ ID NO: 104
WP_048327215.1type II CRISPR RNA-guided endonuclease Cas9 [Streptococcus dysgalactiae] SEQ ID NO: 105
WP_049519324.1 CRISPR-associated protein Csn1 [Streptococcus dysgalactiae] SEQ ID NO: 106
WP_012515931.1type II CRISPR RNA-guided endonuclease Cas9 [Streptococcus equi] SEQ ID NO: 107
WP_021320964.1type II CRISPR RNA-guided endonuclease Cas9 [Streptococcus equi] SEQ ID NO: 108
WP_037581760.1type II CRISPR RNA-guided endonuclease Cas9 [Streptococcus equi] SEQ ID NO: 109
WP_004232481.1type II CRISPR RNA-guided endonuclease Cas9 [Streptococcus equinus] SEQ ID NO: 110
WP_009854540.1type II CRISPR RNA-guided endonuclease Cas9 [Streptococcus gallolyticus] SEQ ID NO: 111
WP_012962174.1type II CRISPR RNA-guided endonuclease Cas9 [Streptococcus gallolyticus] SEQ ID NO: 112
WP_039695303.1type II CRISPR RNA-guided endonuclease Cas9 [Streptococcus gallolyticus] SEQ ID NO: 113
WP_014334983.1type II CRISPR RNA-guided endonuclease Cas9 [Streptococcus infantarius] SEQ ID NO: 114
WP_003099269.1type II CRISPR RNA-guided endonuclease Cas9 [Streptococcus iniae] SEQ ID NO: 115
AHY15608.1 CRISPR-associated protein Csn1 [Streptococcus iniae] SEQ ID NO: 116
AHY17476.1 CRISPR-associated protein Csn1 [Streptococcus iniae] SEQ ID NO: 117
ESR09100.1 hypothetical protein IUSA1_08595 [Streptococcus iniae IUSA1] SEQ ID NO: 118
AGM98575.1 CRISPR-associated protein Cas9/Csn1, subtype II/NMEMI [Streptococcus iniae SF1] SEQ ID NO: 119
ALF27331.1 CRISPR-associated protein Csn1 [Streptococcus intermedius] SEQ ID NO: 120
WP_018372492.1type II CRISPR RNA-guided endonuclease Cas9 [Streptococcus massiliensis] SEQ ID NO: 121
WP_045618028.1type II CRISPR RNA-guided endonuclease Cas9 [Streptococcus mitis] SEQ ID NO: 122
WP_045635197.1type II CRISPR RNA-guided endonuclease Cas9 [Streptococcus mitis] SEQ ID NO: 123
WP_002263549.1type II CRISPR RNA-guided endonuclease Cas9 [Streptococcus mutans] SEQ ID NO: 124
WP_002263887.1type II CRISPR RNA-guided endonuclease Cas9 [Streptococcus mutans] SEQ ID NO: 125
WP_002264920.1type II CRISPR RNA-guided endonuclease Cas9 [Streptococcus mutans] SEQ ID NO: 126
WP_002269043.1type II CRISPR RNA-guided endonuclease Cas9 [Streptococcus mutans] SEQ ID NO: 127
WP_002269448.1type II CRISPR RNA-guided endonuclease Cas9 [Streptococcus mutans] SEQ ID NO: 128
WP_002271977.1type II CRISPR RNA-guided endonuclease Cas9 [Streptococcus mutans] SEQ ID NO: 129
WP_002272766.1type II CRISPR RNA-guided endonuclease Cas9 [Streptococcus mutans] SEQ ID NO: 130
WP_002273241.1type II CRISPR RNA-guided endonuclease Cas9 [Streptococcus mutans] SEQ ID NO: 131
WP_002275430.1type II CRISPR RNA-guided endonuclease Cas9 [Streptococcus mutans] SEQ ID NO: 132
WP_002276448.1type II CRISPR RNA-guided endonuclease Cas9 [Streptococcus mutans] SEQ ID NO: 133
WP_002277050.1type II CRISPR RNA-guided endonuclease Cas9 [Streptococcus mutans] SEQ ID NO: 134
WP_002277364.1type II CRISPR RNA-guided endonuclease Cas9 [Streptococcus mutans] SEQ ID NO: 135
WP_002279025.1type II CRISPR RNA-guided endonuclease Cas9 [Streptococcus mutans] SEQ ID NO: 136
WP_002279859.1type II CRISPR RNA-guided endonuclease Cas9 [Streptococcus mutans] SEQ ID NO: 137
WP_002280230.1type II CRISPR RNA-guided endonuclease Cas9 [Streptococcus mutans] SEQ ID NO: 138
WP_002281696.1type II CRISPR RNA-guided endonuclease Cas9 [Streptococcus mutans] SEQ ID NO: 139
WP_002282247.1type II CRISPR RNA-guided endonuclease Cas9 [Streptococcus mutans] SEQ ID NO: 140
WP_002282906.1type II CRISPR RNA-guided endonuclease Cas9 [Streptococcus mutans] SEQ ID NO: 141
WP_002283846.1type II CRISPR RNA-guided endonuclease Cas9 [Streptococcus mutans] SEQ ID NO: 142
WP_002287255.1type II CRISPR RNA-guided endonuclease Cas9 [Streptococcus mutans] SEQ ID NO: 143
WP_002288990.1type II CRISPR RNA-guided endonuclease Cas9 [Streptococcus mutans] SEQ ID NO: 144
WP_002289641.1type II CRISPR RNA-guided endonuclease Cas9 [Streptococcus mutans] SEQ ID NO: 145
WP_002290427.1type II CRISPR RNA-guided endonuclease Cas9 [Streptococcus mutans] SEQ ID NO: 146
WP_002295753.1type II CRISPR RNA-guided endonuclease Cas9 [Streptococcus mutans] SEQ ID NO: 147
WP_002296423.1type II CRISPR RNA-guided endonuclease Cas9 [Streptococcus mutans] SEQ ID NO: 148
WP_002304487.1type II CRISPR RNA-guided endonuclease Cas9 [Streptococcus mutans] SEQ ID NO: 149
WP_002305844.1type II CRISPR RNA-guided endonuclease Cas9 [Streptococcus mutans] SEQ ID NO: 150
WP_002307203.1type II CRISPR RNA-guided endonuclease Cas9 [Streptococcus mutans] SEQ ID NO: 151
WP_002310390.1type II CRISPR RNA-guided endonuclease Cas9 [Streptococcus mutans] SEQ ID NO: 152
WP_002352408.1type II CRISPR RNA-guided endonuclease Cas9 [Streptococcus mutans] SEQ ID NO: 153
WP_012997688.1type II CRISPR RNA-guided endonuclease Cas9 [Streptococcus mutans] SEQ ID NO: 154
WP_014677909.1type II CRISPR RNA-guided endonuclease Cas9 [Streptococcus mutans] SEQ ID NO: 155
WP_019312892.1type II CRISPR RNA-guided endonuclease Cas9 [Streptococcus mutans] SEQ ID NO: 156
WP_019313659.1type II CRISPR RNA-guided endonuclease Cas9 [Streptococcus mutans] SEQ ID NO: 157
WP_019314093.1type II CRISPR RNA-guided endonuclease Cas9 [Streptococcus mutans] SEQ ID NO: 158
WP_019315370.1type II CRISPR RNA-guided endonuclease Cas9 [Streptococcus mutans] SEQ ID NO: 159
WP_019803776.1type II CRISPR RNA-guided endonuclease Cas9 [Streptococcus mutans] SEQ ID NO: 160
WP_019805234.1type II CRISPR RNA-guided endonuclease Cas9 [Streptococcus mutans] SEQ ID NO: 161
WP_024783594.1type II CRISPR RNA-guided endonuclease Cas9 [Streptococcus mutans] SEQ ID NO: 162
WP_024784288.1type II CRISPR RNA-guided endonuclease Cas9 [Streptococcus mutans] SEQ ID NO: 163
WP_024784666.1type II CRISPR RNA-guided endonuclease Cas9 [Streptococcus mutans] SEQ ID NO: 164
WP_024784894.1type II CRISPR RNA-guided endonuclease Cas9 [Streptococcus mutans] SEQ ID NO: 165
WP_024786433.1type II CRISPR RNA-guided endonuclease Cas9 [Streptococcus mutans] SEQ ID NO: 166
WP_049473442.1CRISPR-associated protein Csn1 [Streptococcus mutans] SEQ ID NO: 167
WP_049474547.1CRISPR-associated protein Csn1 [Streptococcus mutans] SEQ ID NO: 168
EMC03581.1 hypothetical protein SMU69_09359 [Streptococcus mutans NLML4] SEQ ID NO: 169
WP_000428612.1type II CRISPR RNA-guided endonuclease Cas9 [Streptococcus oralis] SEQ ID NO: 170
WP_000428613.1type II CRISPR RNA-guided endonuclease Cas9 [Streptococcus oralis] SEQ ID NO: 171
WP_049523028.1 CRISPR-associated protein Csn1 [Streptococcus parasanguinis] SEQ ID NO: 172
WP_003107102.1type II CRISPR RNA-guided endonuclease Cas9 [Streptococcus parauberis] SEQ ID NO: 173
WP_054279288.1type II CRISPR RNA-guided endonuclease Cas9 [Streptococcus phocae] SEQ ID NO: 174
WP_049531101.1 CRISPR-associated protein Csn1 [Streptococcus pseudopneumoniae] SEQ ID NO: 175
WP_049538452.1 CRISPR-associated protein Csn1 [Streptococcus pseudopneumoniae] SEQ ID NO: 176
WP_049549711.1 CRISPR-associated protein Csn1 [Streptococcus pseudopneumoniae] SEQ ID NO: 177
WP_007896501.1type II CRISPR RNA-guided endonuclease Cas9 [Streptococcus pseudoporcinus] SEQ ID NO: 178
EFR44625.1 CRISPR-associated protein, Csn1 family [Streptococcus pseudoporcinus SPIN 20026] SEQ ID NO: 179
WP_002897477.1 type II CRISPR RNA-guided endonuclease Cas9 [Streptococcus sanguinis] SEQ ID NO: 180
WP_002906454.1type II CRISPR RNA-guided endonuclease Cas9 [Streptococcus sanguinis] SEQ ID NO: 181
WP_009729476.1type II CRISPR RNA-guided endonuclease Cas9 [Streptococcus sp. F0441] SEQ ID NO: 182
CQR24647.1 CRISPR-associated protein [Streptococcus sp. FF10] SEQ ID NO: 183
WP_000066813.1type II CRISPR RNA-guided endonuclease Cas9 [Streptococcus sp. M334] SEQ ID NO: 184
WP_009754323.1 type II CRISPR RNA-guided endonuclease Cas9 [Streptococcus sp. taxon 056] SEQ ID NO: 185
WP_044674937.1type II CRISPR RNA-guided endonuclease Cas9 [Streptococcus suis] SEQ ID NO: 186
WP_044676715.1type II CRISPR RNA-guided endonuclease Cas9 [Streptococcus suis] SEQ ID NO: 187
WP_044680361.1type II CRISPR RNA-guided endonuclease Cas9 [Streptococcus suis] SEQ ID NO: 188
WP_044681799.1type II CRISPR RNA-guided endonuclease Cas9 [Streptococcus suis] SEQ ID NO: 189
WP_049533112.1CRISPR-associated protein Csn1 [Streptococcus suis] SEQ ID NO: 190
WP_029090905.1type II CRISPR RNA-guided endonuclease Cas9 [Brochothrix thermosphacta] SEQ ID NO: 191
WP_006506696.1type II CRISPR RNA-guided endonuclease Cas9 [Catenibacterium mitsuokai] SEQ ID NO: 192
AIT42264.1 Cas9hc:NLS:HA [Cloning vector pYB196] SEQ ID NO: 193
WP_034440723.1type II CRISPR endonuclease Cas9 [Clostridiales bacterium S5-All] SEQ ID NO: 194
AKQ21048.1 Cas9 [CRISPR-mediated gene targeting vector p(bhsp68-Cas9)] SEQ ID NO: 195
WP_004636532.1type II CRISPR RNA-guided endonuclease Cas9 [Dolosigranulum pigrum] SEQ ID NO: 196
WP_002364836.1MULTISPECIES: type II CRISPR RNA-guided endonuclease Cas9 [Enterococcus] SEQ ID NO: 197
WP_016631044.1MULTISPECIES: type II CRISPR RNA-guided endonuclease Cas9 [Enterococcus] SEQ ID NO: 198
EMS75795.1 hypothetical protein H318_06676 [Enterococcus durans IPLA 655] SEQ ID NO: 199
WP_002373311.1type II CRISPR RNA-guided endonuclease Cas9 [Enterococcus faecalis] SEQ ID NO: 200
WP_002378009.1type II CRISPR RNA-guided endonuclease Cas9 [Enterococcus faecalis] SEQ ID NO: 201
WP_002407324.1type II CRISPR RNA-guided endonuclease Cas9 [Enterococcus faecalis] SEQ ID NO: 202
WP_002413717.1type II CRISPR RNA-guided endonuclease Cas9 [Enterococcus faecalis] SEQ ID NO: 203
WP_010775580.1type II CRISPR RNA-guided endonuclease Cas9 [Enterococcus faecalis] SEQ ID NO: 204
WP_010818269.1type II CRISPR RNA-guided endonuclease Cas9 [Enterococcus faecalis] SEQ ID NO: 205
WP_010824395.1type II CRISPR RNA-guided endonuclease Cas9 [Enterococcus faecalis] SEQ ID NO: 206
WP_016622645.1type II CRISPR RNA-guided endonuclease Cas9 [Enterococcus faecalis] SEQ ID NO: 207
WP_033624816.1type II CRISPR RNA-guided endonuclease Cas9 [Enterococcus faecalis] SEQ ID NO: 208
WP_033625576.1type II CRISPR RNA-guided endonuclease Cas9 [Enterococcus faecalis] SEQ ID NO: 209
WP_033789179.1type II CRISPR RNA-guided endonuclease Cas9 [Enterococcus faecalis] SEQ ID NO: 210
WP_002310644.1type II CRISPR RNA-guided endonuclease Cas9 [Enterococcus faecium] SEQ ID NO: 211
WP_002312694.1type II CRISPR RNA-guided endonuclease Cas9 [Enterococcus faecium] SEQ ID NO: 212
WP_002314015.1type II CRISPR RNA-guided endonuclease Cas9 [Enterococcus faecium] SEQ ID NO: 213
WP_002320716.1type II CRISPR RNA-guided endonuclease Cas9 [Enterococcus faecium] SEQ ID NO: 214
WP_002330729.1type II CRISPR RNA-guided endonuclease Cas9 [Enterococcus faecium] SEQ ID NO: 215
WP_002335161.1type II CRISPR RNA-guided endonuclease Cas9 [Enterococcus faecium] SEQ ID NO: 216
WP_002345439.1type II CRISPR RNA-guided endonuclease Cas9 [Enterococcus faecium] SEQ ID NO: 217
WP_034867970.1type II CRISPR RNA-guided endonuclease Cas9 [Enterococcus faecium] SEQ ID NO: 218
WP_047937432.1type II CRISPR RNA-guided endonuclease Cas9 [Enterococcus faecium] SEQ ID NO: 219
WP_010720994.1type II CRISPR RNA-guided endonuclease Cas9 [Enterococcus hirae] SEQ ID NO: 220
WP_010737004.1type II CRISPR RNA-guided endonuclease Cas9 [Enterococcus hirae] SEQ ID NO: 221
WP_034700478.1type II CRISPR RNA-guided endonuclease Cas9 [Enterococcus hirae] SEQ ID NO: 222
WP_007209003.1type II CRISPR RNA-guided endonuclease Cas9 [Enterococcus italicus] SEQ ID NO: 223
WP_023519017.1type II CRISPR RNA-guided endonuclease Cas9 [Enterococcus mundtii] SEQ ID NO: 224
WP_010770040.1type II CRISPR RNA-guided endonuclease Cas9 [Enterococcus phoeniculicola] SEQ ID NO: 225
WP_048604708.1type II CRISPR RNA-guided endonuclease Cas9 [Enterococcus sp. AM1] SEQ ID NO: 226
WP_010750235.1type II CRISPR RNA-guided endonuclease Cas9 [Enterococcus villorum] SEQ ID NO: 227
AII16583.1 Cas9 endonuclease [Expression vector pCas9] SEQ ID NO: 228
WP_029073316.1type II CRISPR RNA-guided endonuclease Cas9 [Kandleria vitulina] SEQ ID NO: 229
WP_031589969.1type II CRISPR RNA-guided endonuclease Cas9 [Kandleria vitulina] SEQ ID NO: 230
KDA45870.1 CRISPR-associated protein Cas9/Csn1, subtype II/NMEMI [Lactobacillus animal's] SEQ ID NO: 231
WP_039099354.1type II CRISPR RNA-guided endonuclease Cas9 [Lactobacillus curvatus] SEQ ID NO: 232
AKP02966.1 hypothetical protein ABB45_04605 [Lactobacillus farciminis] SEQ ID NO: 233
WP_010991369.1type II CRISPR RNA-guided endonuclease Cas9 [Listeria innocua] SEQ ID NO: 234
WP_033838504.1type II CRISPR RNA-guided endonuclease Cas9 [Listeria innocua] SEQ ID NO: 235
EHN60060.1 CRISPR-associated protein, Csn1 family [Listeria innocua ATCC 33091] SEQ ID NO: 236
EFR89594.1 crispr-associated protein, Csn1 family [Listeria innocua FSL 54-378] SEQ ID NO: 237
WP_038409211.1type II CRISPR RNA-guided endonuclease Cas9 [Listeria ivanovii] SEQ ID NO: 238
EFR95520.1 crispr-associated protein Csn1 [Listeria ivanovii FSL F6-596] SEQ ID NO: 239
WP_003723650.1type II CRISPR RNA-guided endonuclease Cas9 [Listeria monocytogenes] SEQ ID NO: 240
WP_003727705.1type II CRISPR RNA-guided endonuclease Cas9 [Listeria monocytogenes] SEQ ID NO: 241
WP_003730785.1type II CRISPR RNA-guided endonuclease Cas9 [Listeria monocytogenes] SEQ ID NO: 242
WP_003733029.1type II CRISPR RNA-guided endonuclease Cas9 [Listeria monocytogenes] SEQ ID NO: 243
WP_003739838.1type II CRISPR RNA-guided endonuclease Cas9 [Listeria monocytogenes] SEQ ID NO: 244
WP_014601172.1type II CRISPR RNA-guided endonuclease Cas9 [Listeria monocytogenes] SEQ ID NO: 245
WP_023548323.1type II CRISPR RNA-guided endonuclease Cas9 [Listeria monocytogenes] SEQ ID NO: 246
WP_031665337.1type II CRISPR RNA-guided endonuclease Cas9 [Listeria monocytogenes] SEQ ID NO: 247
WP_031669209.1type II CRISPR RNA-guided endonuclease Cas9 [Listeria monocytogenes] SEQ ID NO: 248
WP_033920898.1type II CRISPR RNA-guided endonuclease Cas9 [Listeria monocytogenes] SEQ ID NO: 249
AKI42028.1 CRISPR-associated protein [Listeria monocytogenes] SEQ ID NO: 250
AK150529.1 CRISPR-associated protein [Listeria monocytogenes] SEQ ID NO: 251
EFR83390.1 crispr-associated protein Csn1 [Listeria monocytogenes FSL F2-208] SEQ ID NO: 252
WP_046323366.1type II CRISPR RNA-guided endonuclease Cas9 [Listeria seeligeri] SEQ ID NO: 253
AKE81011.1 Cas9 [Plant multiplex genome editing vector pYLCRISPR/Cas9Pubi-H] SEQ ID NO: 254
CU082355.1 Uncharacterized protein conserved in bacteria [Roseburia hominis] SEQ ID NO: 255
WP_033162887.1type II CRISPR RNA-guided endonuclease Cas9 [Sharpea azabuensis] SEQ ID NO: 256
AGZ01981.1 Cas9 endonuclease [synthetic construct] SEQ ID NO: 257
AKA60242.1 nuclease deficient Cas9 [synthetic construct] SEQ ID NO: 258
AKS40380.1 Cas9 [Synthetic plasmid pFC330] SEQ ID NO: 259

### 4UN5_B Cas9, Chain B, Crystal Structure SEQ ID NO: 260

[0215] Non-limiting examples of suitable deaminase domains are provided.

Human AID
(SEQ ID NO: 270)
[sequence omitted]
(underline: nuclear localization signal; double underline: nuclear
export signal)
Mouse AID
(SEQ ID NO: 271)
MDSLLMKQKKFLYHFKNVRWAKGRHETYLCYVVKRRDSATSCSLDFGHLRNKSGCHVELLFLRYISD
WDLDPGRCYRVTWFTSWSPCYDCARHVAEFLRWNPNLSLRIFTARLYFCEDRKAEPEGLRRLHRAGVQI
GIMTFKDYFYCWNTFVENRERTFKAWEGLHENSVRLTRQLRRILLPLYEVDDLRDAFRMLGF
(underline: nuclear localization signal; double underline: nuclear
export signal)
Dog AID
(SEQ ID NO: 272)
MDSLLMKQRKFLYHFKNVRWAKGRHETYLCYVVKRRDSATSFSLDFGHLRNKSGCHVELLFLRYISDW
DLDPGRCYRVTWFTSWSPCYDCARHVADFLRGYPNLSLRIFAARLYFCEDRKAEPEGLRRLHRAGVQIA
IMTFKDYFYCWNTFVENREKTFKAWEGLHENSVRLSRQLRRILLPLYEVDDLRDAFRTLGL
(underline: nuclear localization signal; double underline: nuclear
export signal)
Bovine AID
(SEQ ID NO: 273)
MDSLLKKQRQFLYQFKNVRWAKGRHETYLCYVVKRRDSPTSFSLDFGHLRNKAGCHVELLFLRYISDW
DLDPGRCYRVTWFTSWSPCYDCARHVADFLRGYPNLSLRIFTARLYFCDKERKAEPEGLRRLHRAGVQI
AIMTFKDYFYCWNTFVENHERTFKAWEGLHENSVRLSRQLRRILLPLYEVDDLRDAFRTLGL
(underline: nuclear localization signal; double underline: nuclear
export signal)
Mouse APOBEC-3
(SEQ ID NO: 274)
MGPFCLGCSHRKCYSPIRNLISQETFKFHFKNLGYAKGRKDTFLCYEVTRKDCDSPVSLHHGVFKNKDNI
HAEICFLYWFHDKVLKVLSPREEFKITWYMSWSPCFECAEQIVRFLATHHNLSLDIFSSRLYNVQDPETQQN
LCRLVQEGAQVAAMDLYEFKKCWKKFVDNGGRRFRPWKRLLTNFRYQDSKLQEILRPCYIPVPSSSSST
LSNICLTKGLPETRFCVEGRRMDPLSEEEFYSQFYNQRVKHLCYYHRMKPYLCYQLEQFNGQAPLKGCL
LSEKGKQHAEILFLDKIRSMELSQVTITCYLTWSPCPNCAWQLAAFKRDRPDLILHIYTSRLYFHWKRPFQK
GLCSLWQSGILVDVMDLPQFTDCWTNFVNPKRPFWPWKGLEIISRRTQRRLRRIKESWGLQDLVNDFGN
LQLGPPMS
(italic: nucleic acid editing domain)
Rat APOBEC-3
(SEQ ID NO: 275)
MGPFCLGCSHRKCYSPIRNLISQETFKFHFKNLRYAIDRKDTFLCYEVTRKDCDSPVSLHHGVFKNKDNI
HAEICFLYWFHDKVLKVLSPREEFKITWYMSWSPCFECAEQVLRFLATHHNLSLDIFSSRLYNIRDPENQQN
LCRLVQEGAQVAAMDLYEFKKCWKKFVDNGGRRFRPWKKLLTNFRYQDSKLQEILRPCYIPVPSSSSST
LSNICLTKGLPETRFCVERRRVHLLSEEEFYSQFYNQRVKHLCYYHGVKPYLCYQLEQFNGQAPLKGCLL
SEKGKQHAEILFLDKIRSMELSQVIITCYLTWSPCPNCAWQLAAFKRDRPDLILHIYTSRLYFHWKRPFQKG
LCSLWQSGILVDVMDLPQFTDCWTNFVNPKRPFWPWKGLEIISRRTQRRLHRIKESWGLQDLVNDFGNL
QLGPPMS
(italic: nucleic acid editing domain)
Rhesus macaque APOBEC-3G
(SEQ ID NO: 276)
MVEPMDPRTFVSNFNNRPILSGLNTVWLCCEVKTKDPSGPPLDAKIFQGKVYSKAKYHPEMRFLRWFHK
WRQLHHDQEYKVTWYVSWSPCTRCANSVATFLAKDPKVTLTIFVARLYYFWKPDYQQALRILCQKRGGP
HATMKIMNYNEFQDCWNKFVDGRGKPFKPRNNLPKHYTLLQATLGELLRHLMDPGTFTSNFNNKPWV
SGQHETYLCYKVERLHNDTWVPLNQHRGFLRNQAPNIHGFPKGRHAELCFLDLIPFWKLDGQQYRVTCFT
SWSPCFSCAQEMAKFISNNEHVSLCIFAARIYDDQGRYQEGLRALHRDGAKIAMMNYSEFEYCWDTFVD
RQGRPFQPWDGLDEHSQALSGRLRAI
(italic: nucleic acid editing domain; underline: cytoplasmic
localization signal)
Chimpanzee APOBEC-3G
(SEQ ID NO: 277)
MKPHFRNPVERMYQDTFSDNFYNRPILSHRNTVWLCYEVKTKGPSRPPLDAKIFRGQVYSKLKYHPEMR
FFHWFSKWRKLHRDQEYEVTWYISWSPCTKCTRDVATFLAEDPKVTLTIFVARLYYFWDPDYQEALRSLC
QKRDGPRATMKIMNYDEFQHCWSKFVYSQRELFEPWNNLPKYYILLHIMLGEILRHSMDPPTFTSNFNN
ELWVRGRHETYLCYEVERLHNDTWVLLNQRRGFLCNQAPHKHGFLEGRHAELCFLDVIPFWKLDLHQD
YRVTCFTSWSPCFSCAQEMAKFISNNKHVSLCIFAARIYDDQGRCQEGLRTLAKAGAKISIMTYSEFKHCW
DTFVDHQGCPFQPWDGLEEHSQALSGRLRAILQNQGN
(italic: nucleic acid editing domain; underline: cytoplasmic
localization signal)
Green monkey APOBEC-3G
(SEQ ID NO: 278X)
MNPQIRNMVEQMEPDIFVYYFNNRPILSGRNTVWLCYEVKTKDPSGPPLDANIFQGKLYPEAKDHPEMK
FLHWFRKWRQLHRDQEYEVTWYVSWSPCTRCANSVATFLAEDPKVTLTIFVARLYYFWKPDYQQALRILC
QERGGPHATMKIMNYNEFQHCWNEFVDGQGKPFKPRKNLPKHYTLLHATLGELLRHVMDPGTFTSNFN
NKPWVSGQRETYLCYKVERSHNDTWVLLNQHRGFLRNQAPDRHGFPKGRHAELCFLDLIPFWKLDDQQ
YRVTCFTSWSPCFSCAQKMAKFISNNKHVSLCIFAARIYDDQGRCQEGLRTLHRDGAKIAVMNYSEPEYC
WDTFVDRQGRPFQPWDGLDEHSQALSGRLRAI
(italic: nucleic acid editing domain; underline: cytoplasmic
localization signal)
Human APOBEC-3G
(SEQ ID NO: 279)
MKPHFRNTVERMYRDTFSYNFYNRPILSRRNTVWLCYEVKTKGPSRPPLDAKIFRGQVYSELKYHPEMR
FFHWFSKWRKLHRDQEYEVTWYISWSPCTKCTRDMATFLAEDPKVTLTIFVARLYYFWDPDYQEALRSLC
QKRDGPRATMKIMNYDEFQHCWSKFVYSQRELFEPWNNLPKYYILLHIMLGEILRHSMDPPTFTFNFNN
EPWVRGRHETYLCYEVERMHNDTWVLLNQRRGFLCNQAPHKHGFLEGRHAELCFLDVIPFWKLDLDQD
YRVTCFTSWSPCFSCAQEMAKFISKNKHVSLCIFTARIYDDQGRCQEGLRTLAEAGAKISIMTYSEFKHCW
DTFVDHQGCPFQPWDGLDEHSQDLSGRLRAILQNQEN
(italic: nucleic acid editing domain; underline: cytoplasmic
localization signal)
Human APOBEC-3F
(SEQ ID NO: 280)
MKPHFRNTVERMYRDTFSYNFYNRPILSRRNTVWLCYEVKTKGPSRPRLDAKIFRGQVYSQPEHHAEMC
FLSWFCGNQLPAYKCFQITWFVSWTPCPDCVAKLAEFLAEHPNVTLTISAARLYYYWERDYRRALCRLSQ
AGARVKIMDDEEFAYCWENFVYSEGQPFMPWYKFDDNYAFLHRTLKEILRNPMEAMYPHIFYFHFKNL
RKAYGRNESWLCFTMEVVKHHSPVSWKRGVFRNQVDPETHCHAERCFLSWFCDDILSPNTNYEVTWYTS
WSPCPECAGEVAEFLARHSNVNLTIFTARLYYFWDTDYQEGLRSLSQEGASVEIMGYKDFKYCWENFVY
NDDEPFKPWKGLKYNFLFLDSKLQEILE
(italic: nucleic acid editing domain)
Human APOBEC-3B
(SEQ ID NO: 281)
MNPQIRNPMERMYRDTFYDNFENEPILYGRSYTWLCYEVKIKRGRSNLLWDTGVFRGQVYFKPQYHAE
MCFLSWFCGNQLPAYKCFQITWFVSWTPCPDCVAKLAEFLSEHPNVTLTISAARLYYYWERDYRRALCRL
SQAGARVTIMDYEEFAYCWENFVYNEGQQFMPWYKFDENYAFLHRTLKEILRYLMDPDTFTFNFNNDP
LVLRRRQTYLCYEVERLDNGTWVLMDQHMGFLCNEAKNLLCGFYGRHAELRFLDLVPSLQLDPAQIYRV
TWFISWSPCFSWGCAGEVRAFLQENTHVRLRIFAARIYDYDPLYKEALQMLRDAGAQVSIMTYDEFEYC
WDTFVYRQGCPFQPWDGLEEHSQALSGRLRAILQNQGN
(italic: nucleic acid editing domain)
Human APOBEC-3C:
(SEQ ID NO: 282)
MNPQIRNPMKAMYPGTFYFQFKNLWEANDRNETWLCFTVEGIKRRSVVSWKTGVFRNQVDSETHCHAE
RCFLSWFCDDILSPNTKYQVTWYTSWSPCPDCAGEVAEFLARHSNVNLTIFTARLYYFQYPCYQEGLRSLS
QEGVAVEIMDYEDFKYCWENFVYNDNEPFKPWKGLKTNFRLLKRRLRESLQ
(italic: nucleic acid editing domain)
Human APOBEC-3A:
(SEQ ID NO: 283)
MEASPASGPRHLMDPHIFTSNFNNGIGRHKTYLCYEVERLDNGTSVKMDQHRGFLHNQAKNLLCGFYG
RHAELRFLDLVPSLQLDPAQIYRVTWFISWSPCFSWGCAGEVRAFLQENTHVRLRIFAARIYDYDPLYKEAL
QMLRDAGAQVSIMTYDEFKHCWDTFVDHQGCPFQPWDGLDEHSQALSGRLRAILQNQGN
(italic: nucleic acid editing domain)
Human APOBEC-3H:
(SEQ ID NO: 284)
MALLTAETFRLQFNNKRRLRRPYYPRKALLCYQLTPQNGSTPTRGYFENKKKCHAEICHNEIKSMGLDET
QCYQVTCYLTWSPCSSCAWELVDFIKAHDHLNLGIFASRLYYHWCKPQQKGLRLLCGSQVPVEVMGFPKF
ADCWENFVDHEKPLSFNPYKMLEELDKNSRAIKRRLERIKIPGVRAQGRYMDILCDAEV
(italic: nucleic acid editing domain)
Human APOBEC-3D
(SEQ ID NO: 285)
MNPQIRNPMERMYRDTFYDNFENEPILYGRSYTWLCYEVKIKRGRSNLLWDTGVFRGPVLPKRQSNHR
QEVYFRFENHAEMCFLSWFCGNRLPANRRFQITWFVSWNPCLPCVVKVTKFLAEHPNVTLTISAARLYYY
RDRDWRWVLLRLHKAGARVKIMDYEDFAYCWENFVCNEGQPFMPWYKFDDNYASLHRTLKEILRNP
MEAMYPHIFYFHFKNLLKACGRNESWLCFTMEVTKHHSAVFRKRGVFRNQVDPETHCHAERCFLSWFC
DDILSPNTNYEVTWYTSWSPCPECAGEVAEFLARHSNVNLTIFTARLCYFWDTDYQEGLCSLSQEGASVKI
MGYKDFVSCWKNFVYSDDEPFKPWKGLQTNFRLLKRRLREILQ
(italic: nucleic acid editing domain)
Human APOBEC-1
(SEQ ID NO: 286)
MTSEKGPSTGDPTLRRRIEPWEFDVFYDPRELRKEACLLYEIKWGMSRKIWRSSGKNTTNHVEVNFIKKF
TSERDFHPSMSCSITWFLSWSPCWECSQAIREFLSRHPGVTLVIYVARLFWHMDQQNRQGLRDLVNSGV
TIQIMRASEYYHCWRNFVNYPPGDEAHWPQYPPLWMMLYALELHCIILSLPPCLKISRRWQNHLTFFRLH
LQNCHYQTIPPHILLATGLIHPSVAWR
Mouse APOBEC-1
(SEQ ID NO: 287)
mSSETGPVAVDPTLRRRIEPHEFEVFFDPRELRKETCLLYEINWGGRHSVWRHTSQNTSNHVEVNFLEKF
TTERYFRPNTRCSITWFLSWSPCGECSRAITEFLSRHPYVTLFIYIARLYHHTDQRNRQGLRDLISSGVTIQI
MTEQEYCYCWRNFVNYPPSNEAYWPRYPHLWVKLYVLELYCIILGLPPCLKILRRKQPQLTFFTITLQTC
HYQRIPPHLLWATGLK
Rat APOBEC-1
(SEQ ID NO: 288)
[sequence omitted]
Petromyzon marinus CDA1 (pmCDA1)
(SEQ ID NO: 378)
MTDAEYVRIHEKLDIYTFKKQFFNNKKSVSHRCYVLFELKRRGERRACFWGYAVNKPQSGTERGIHAEI
FSIRKVEEYLRDNPGQFTINWYSSWSPCADCAEKILEWYNQELRGNGHTLKIWACKLYYEKNARNQIGL
WNLRDNGVGLNVMVSEHYQCCRKIFIQSSHNQLNENRWLEKTLKRAEKRRSELSIMIQVKILHTTKSPAV
Human APOBEC3G D316R_D317R
(SEQ ID NO: 379)
MKPHFRNTVERMYRDTFSYNFYNRPILSRRNTVWLCYEVKTKGPSRPPLDAKIFRGQVYSELKYHPEMR
FFHWFSKWRKLHRDQEYEVTWYISWSPCTKCTRDMATFLAEDPKVTLTIFVARLYYFWDPDYQEALRS
LCQKRDGPRATMKIMNYDEFQHCWSKFVYSQRELFEPWNNLPKYYILLHIMLGEILRHSMDPPTFTFNF
NNEPWVRGRHETYLCYEVERMHNDTWVLLNQRRGFLCNQAPHKHGFLEGRHAELCFLDVIPFWKLDL
DQDYRVTCFTSWSPCFSCAQEMAKFISKNKHVSLCIFTARIYRRQGRCQEGLRTLAEAGAKISIMTYSEFK
HCWDTFVDHQGCPFQPWDGLDEHSQDLSGRLRAILQNQEN
Human APOBEC3G chain A
(SEQ ID NO: 380)
MDPPTFTFNFNNEPWVRGRHETYLCYEVERMHNDTWVLLNQRRGFLCNQAPHKHGFLEGRHAELCFLD
VIPFWKLDLDQDYRVTCFTSWSPCFSCAQEMAKFISKNKHVSLCIFTARIYDDQGRCQEGLRTLAEAGAK
ISIMTYSEFKHCWDTFVDHQGCPFQPWDGLDEHSQDLSGRLRAILQ
Human APOBEC3G chain A D120R_D121R
(SEQ ID NO: 381)
MDPPTFTFNFNNEPWVRGRHETYLCYEVERMHNDTWVLLNQRRGFLCNQAPHKHGFLEGRHAELCFLD
VIPFWKLDLDQDYRVTCFTSWSPCFSCAQEMAKFISKNKHVSLCIFTARIYRRQGRCQEGLRTLAEAGAK
ISIMTYSEFKHCWDTFVDHQGCPFQPWDGLDEHSQDLSGRLRAILQ
Non-limiting examples of fusion proteins/nucleobase editors are provided.
His₆-rAPOBEC1-XTEN-dCas9 for Escherichia coli expression
(SEQ ID NO: 291)
MGSSHHHHHHMSSETGPVAVDPTLRRRIEPHEFEVFFDPRELRKETCLLYEINWGGRHSIWRHTSQNTN
KHVEVNFIEKFTTERYFCPNTRCSITWFLSWSPCGECSRAITEFLSRYPHVTLFIYIARLYHHADPRNRQGL
RDLISSGVTIQIMTEQESGYCWRNFVNYSPSNEAHWPRYPHLWVRLYVLELYCIILGLPPCLNILRRKQPQ
LTFFTIALQSCHYQRLPPHILWATGLKSGSETPGTSESATPESDKKYSIGLAIGTNSVGWAVITDEYKVPSK
KFKVLGNTDRHSIKKNUGALLFDSGETAEATRLKRTARRRYTRRKNRICYLQEIFSNEMAKVDDSFFHRL
EESFLVEEDK|KHERHPIFGNIVDEVAYHEKYPTIYHLRKKLVDSTDKADLRLIYLALAHMIKFRGHFLIEGDL
NPDNSDVDKLFQLVQTYNQLFEENPINASGVDAKAILSARLSKSRRLENLIAQLPGEKKNGLFGNLIALSL
GLTPNFKSNFDLAEDAKLQLSKDTYDDDLDNLLAQIGOQYADLFLAAKNLSDAILLSDILRVNTEITKAPLSA
SMIKRYDEHHQDLTLLKALVRQQLPEKYKEIFFDQSKNGYAGYIDGGASQEEFYKHKPILEKMDGTEELL
VKLNREDLLRKQRTFDNGSIPHQIHLGELHAILRRQEDFYPFLKDNREKIEKILTFRIPYYVGPLARGNSRF
AWMTRKSEETITPWNFEEVVDKGASAQSFIERMTNFDKNLPNEKVLPKHSLLYEYFTVYNELTKVKYVTE
GMRKPAFLSGEQKKAIVDLLFKTNRKVTVKQLKEDYFKKIECFDSVEISGVEDRFNASLGTYHDLLKIIKDK
DFLDNEENEDILEDIVLTLTLFEDREMIEERLKTYAHLFDDKVMKQLKRRRYTGWGRLSRKLINGIRDKQS
GKTILDFLKSDGFANRNFMQLIHDDSLTFKEDIQKAQVSGQGDSLHEHIANLAGSPAIKKGILQTVKVVDEL
VKVMGRHKPENIVIEMARENQTTQKGQKNSRERMKRIEEGIKELGSQILKEHPVENTQLQNEKLYLYYLQ
NGRDMYVDQELDINRLSDYDVDAIVPQSFLKDDSIDNKVLTRSDKNRGKSDNVPSEEVVKKMKNYWRQL
LNAKLITQRKFDNLTKAERGGLSELDKAGFIKRQLVETRQITKHVAQILDSRMNTKYDENDKLIREVKVITLK
SKLVSDFRKDFQFYKVREINNYHHAHDAYLNAVVGTALIKKYPKLESEFVYGDYKVYDVRKMIAKSEQEIG
KATAKYFFYSNIMNFFKTEITLANGEIRKRPLIETNGETGEIVWDKGRDFATVRKVLSMPQVNIVKKTEVQT
GGFSKESILPKRNSDKLIARKKDWDPKKYGGFDSPTVAYSVLVVAKVEKGKSKKLKSVKELLGITIMERSS
FEKNPIDFLEAKGYKEVKKDLIIKLPKYSLFELENGRKRMLASAGELQKGNELALPSKYVNFLYLASHYEKL
KGSPEDNEQKQLFVEQHKHYLDEIIEQISEFSKRVILADANLDKVLSAYNKHRDKPIREQAENIIHLFTLTNL
GAPAAFKYFDTTIDRKRYTSTKEVLDATLIHQSITGLYETRIDLSQLGGDSGGSPKKKRKV
rAPOBEC1-XTEN-dCas9-NLS for Mammalian expression
(SEQ ID NO: 292)
MSSETGPVAVDPTLRRRIEPHEFEVFFDPRELRKETCLLYEINWGGRHSIWRHTSQNTNKHVEVNFIEKF
TTERYFCPNTRCSITWFLSWSPCGECSRAITEFLSRYPHVTLFIYIARLYHHADPRNRQGLRDLISSGVTIQ
IMTEQESGYCWRNFVNYSPSNEAHWPRYPHLWVRLYVLELYCIILGLPPCLNILRRKQPQLTFFTIALQSC
HYQRLPPHILWATGLKSGSETPGTSESATPESDKKYSIGLAIGTNSVGWAVITDEYKVPSKKFKVLGNTDR
HSIKKNLIGALLFDSGETAEAT|RLKRTARRRYTRRKNRICYLQEIFSNEMAKVDDSFRHRLEESFLVEEDKK
HERHPIFGNIVDEVAYHEKYPTIYHLRKKLVDSTDKADLRLIYLALAHMKFRGHFLIEGDLNPDNSDVDKLF
IQLVQTYNQLFEENPINASGVDAKAILSARLSKSRRLENLIAQLPGEKKNGLFGNLIALSLGLTPNFKSNFDL
AEDAKLQLSKDTYDDDLDNLLAQIGDQYADLFLAAKNLSDAILLSDILRVNTEITKAFLSASMIKRYDEHHQ
DLTLLKALVRQQLPEKYKEIFFDQSKNGYAGYIDGGASQEEFYKFIKPILEKMDGTEELLVKLNREDLLRKQ
RTFDNGSIPHQIHLGELHAILRRQEDFYPFLKDNREKIEKILTFRIPYYVGPLARGNSRFAWMTRKSEETITP
WNFEEVVDKGASAQSFIERMTNFDKNLPNEKVLPKHSLLYEYFTVYNELTKVKYVTEGMRKPAFLSGEQ
KKAIVDLLFKTNRKVTVKQLKEDYFKKIECFDSVEISGVEDRFNASLGTYHDLLKIIKDKDFLDNEENEDILE
DIVLTLTLFEDREMIEERLKTYAHLFDDKVMKQLKRRMYTGWGRLSRKLINGIRDKQSGKTILDFLKSDGFA
NRNFMQLIHDDSLITKEDIQKAQVSGQGDSLHEHIANLAGSPAIKKGILQTVKVVDELVKVMGRHKPENIVI
EMARENQTTQKGQKNSRERMKRIEEGIKELGSQILKEHPVENTQLQNEKLYLYYLQNGRDMYVDQELDI
NRLSDYDVDAIVPQSFLKDDSIDNKVLTRSDKNRGKSDNVPSEEVVKKMKNYWRQLLNAKLITQRKFDNL
TKAERGGLSELDKAGFIKRQLVETRQITKHVAQILDSRMNTKYDENDKLIREVKVITLKSKLVSDFRKDFQF
YKVREINNYHHAHDAYLNAVVGTALIKKYPKLESERNGDYKVYDVRKMIAKSEQEIGKATAKYFFYSNNIM
NFFKTEITLANGEIRKRPLIETNGETGEIWDKGRDFATVRKVLSMPQVNIVKKTEVQTGGFSKESILPKRN
SDKLIARKKWDPKKYGGFDSPTVAYSVLVVAKVEKGKSKKLKSVKELLGITIMERSSFEKNPIDFLEAKG
YKEVKKLIIKLPKYSLFELENGRKRMLASAGELQKGNELALPSKYVNFLYLASHYEKLKGSPEDNEQKQL
FVEQHKHYLDEIIEQISEFSKRVILADANLDKVLSAYNKHRDKPIREQAENIIHLFTLTNLGAPAAFKYFDTTI
DRKRYTSTKEVLDATLIHQSITGLYETRIDLSQLGGDSGGSPKKKRKV
hAPOBEC1-XTEN-dCas9-NLS for Mammalian expression
(SEQ ID NO: 293)
MTSEKGPSTGDPTLRRRIEPWEFDVFYDPRELRKEACLLYEIKWGMSRKIWRSSGKNTTNHVEVNFIKKFT
SERDFHPSMSCSITWFLSWSPCWECSQAIREFLSRHPGVTLVIYVARLFWHMDQQNRQGLRDLVNSGVTI
QIMRASEYYHCWRNFVNYPPGDEAHWPQYPPLWMMLYALELHCIILSLPPCLKISRRWQNHLTFFRLHL
QNCHYQTIPPHILLATGLIHPSVAWRSGSETPGTSESATPESDKKYSIGLAIGTNSVGWAVITDEYKVPSKKF
KVLGNTDRHSIKKNLIGALLFDSGETAEATRLKRTARRRYTRRKNRICYLQEIFSNEMAKVDDSFFHRLEESFL
VEEDKKHERHPIFGNIVDEVAYHEKYPTIYHLRKKLVDSTDKADLRLIYLALAHMIKFRGHFLIEGDLNPDNS
DVDKLFIQLVQTYNQLFEENPINASGVDAKAILSARLSKSRRLENLIAQLPGEKKNGLFGNLIALSLGLTPNFK
SNFDLAEDAKLQLSKDTYDDDLDNLLAQIGDQYADLFLAAKNLSDAILLSDILRVNTEITKAPLSASMIKRYD
EHHQDLTLLKALVRQQLPEKYKEIFFDQSKNGYAGYIDGGASQEEFYKFIKPILEKMDGTEELLVKLNREDLL
RKQRTFDNGSIPHQIHLGELHAILRRQEDFYPFLKDNREKIEKILTFRIPYYVGPLARGNSRFAWMTRKSEETI
TPWNFEEVVDKGASAQSFIERMTNFDKNLPNEKVLPKHSLLYEYFTVYNELTKVKYVTEGMRKPAFLSGEQ
KKAIVDLLFKTNRKVTVKQLKEDYFKKIECFDSVEISGVEDRFNASLGTYHDLLKIIKDKDFLDNEENEDILEDI
VLTLTLFEDREMIEERLKTYAHLFDDKVMKQLKRRRYTGWGRLSRKLINGIRDKQSGKTILDFLKSDGFANR
NFMQLIHDDSLTFKEDIQKAQVSGQGDSLHEHIANLAGSPAIKKGILQTVKVVDELVKVMGRHKPENIVIE
MARENQTTQKGQKNSRERMKRIEEGIKELGSQILKEHPVENTQLQNEKLYLYYLQNGRDMYVDQELDINR
LSDYDVDAIVPQSFLKDDSIDNKVLTRSDKNRGKSDNVPSEEVVKKMKNYWRQLLNAKLITQRKFDNLTKA
ERGGLSELDKAGFIKRQLVETRQITKHVAQILDSRMNTKYDENDKLIREVKVITLKSKLVSDFRKDFQFYKVR
EINNYHHAHDAYLNAVVGTALIKKYPKLESEFVYGDYKVYDVRKMIAKSEQEIGKATAKYFFYSNIMNFFKT
EITLANGEIRKRPLIETNGETGEIVWDKGRDFATVRKVLSMPQVNIVKKTEVQTGGFSKESILPKRNSDKLIA
RKKDWDPKKYGGFDSPTVAYSVLVVAKVEKGKSKKLKSVKELLGITIMERSSFEKNPIDFLEAKGYKEVKKDL
IIKLPKYSLFELENGRKRMLASAGELQKGNELALPSKYVNFLYLASHYEKLKGSPEDNEQKQLFVEQHKHYLD
EIIEQISEFSKRVILADANLDKVLSAYNKHRDKPIREQAENIIHLFTLTNLGAPAAFKYFDTTIDRKRYTSTKEVL
DATLIHQSITGLYETRIDLSQLGGDSGGSPKKKRKV
rAPOBEC1-XTEN-dCas9-UGI-NLS
(SEQ ID NO: 294)
MSSETGPVAVDPTLRRRIEPHEFEVFFDPRELRKETCLLYDNWGGRHSIWRHTSQNTNKHVEVNFIEKF
TTERYFCPNTRCSMNFLSWSPCGECSRAITEFLSRYPHVTLFIYIARLYHHADPRNRQGLRDLISSGVTQ
IMTEQESGYCWRNFVNYSPSNEAHWPRYPHLWVRLYVLELYCIIGLPPCLNILRRKQPQLTFFTIALQSC
HYQRLPPHILWATGLKSGSETPGTSESATPESDKKYSIGLAIGTNSVGWAVITDEYKVPSKKFKVLGNTDR
HSIKKNLIGALLFDSGETAEATRLKRTARRRYTRRKNRKYLQEIFSNEMAKVDDSFFHRLEESFLVEEDKK
HERHPIFGNIVDEVAYHEKYPTIYHLRKKLVDSTDKADLRLIYLALAHMIKFRGHFLIEGDLNPDNSDVDKLF
IQLVQTYNQLFEENPINASGVDAKAILSARLSKSRRLENLIAQLPGEKKNGLFGNLIALSLGLTPNFKSNFDL
AEDAKLQLSKDTYDDDLDNLLAQIGDQYADLFLAAKNLSDAILLSDILRVNTEITKAPLSASMIKRYDEHHQ
DLTLLKALVRQQLPEKYKEIFFDQSKNGYAGYIDGGASQEEFYKFIKPILEKMDGTEELLVKLNREDLLRKQ
RTFDNGSIPHQIHLGELHAILRRQEDFYPFLKDNREKIEKILTFRIPYYVGPLARGNSRFAWMTRKSEETITP
WNFEEVVDKGASAQSFIERMTNFDKNLPNEKVLPKHSLLYEYFTVYNELTKVKYVTEGMRKPAFLSGEQ
KKAIVDLLFKTNRKVTVKQLKEDYFKKIECFDSVEISGVEDRFNASLGTYHDLLKIIKDKDFLDNEENEDILE
DIVLTLTLFEDREMIEERLKTYAHLFDDKVMKQLKRRRYTGWGRLSRKLINGIRDKQSGKTILDFLKSDGFA
NRNFMQLIHDDSLTFKEDIQKAQVSGQGDSLHEHIANLAGSPAIKKGILQTVKVVDELVKVMGRHKPENIVI
EMARENQTTQKGQKNSRERMKRIEEGIKELGSQILKEHPVENTQLQNEKLYLYYLQNGRDMYVDQELDI
NRLSDYDVDAIVPQSFLKDDSIDNKVLTRSDKNRGKSDNVPSEEVVKKMKNYVVRQLLNAKLITQRKFDNL
TKAERGGLSELDKAGFIKRQLVETRQFIKHVAQILDSRMNTKYDENDKLIREVKVITLKSKLVSDFRKDFQF
YKVREINNYHHAHDAYLNAVVGTALIKKYPKLESEFVYGDYKVYDVRKMIAKSEQEIGKATAKYFFYSNIM
NFFKTEITLANGEIRKRPLIETNGETGEIVWDKGRDFATVRKVLSMPQVNIVKKTEVQTGGFSKESILPKRN
SDKLIARKKDWDPKKYGGFDSPTVAYSVLVVAKVEKGKSKKLKSVKELLGITIMERSSFEKNPIDFLEAKG
YKEVKKDLIIKLPKYSLFELENGRKRMLASAGELQKGNELALPSKYVNFLYLASHYEKLKGSPEDNEQKQL
FVEQHKHYLDEIIEQISEFSKRVILADANLDKVLSAYNKHRDKPREQAENIIHLFTLTNLGAPAAFKYFDTTI
DRKRYTSTKEVLDATLIHQSITGLYETRIDLSQLGGDSGGSTNLSDIIEKETGKQLVIQESILMLPEEVEEVIG
NKPESDILVHTAYDESTDENVMLLTSDAPEYKPWALVIQDSNGENKIKMLSGGSPKKKRKV
rAPOBEC1-XTEN-Cas9 nickase-UGI-NLS
(BE3, SEQ ID NO: 295)
MSSETGPVAVDPTLRRRIEPHEFEVFFDPRELRKETCLLYEINWGGRHSIWRHTSQNTNKHVEVNFIEKF
TTERYFCPNTRCSITWFLSWSPCGECSRAITEFLSRYPHVTLFIYIARLYHHADPRNRQGLRDLISSGVTIQ
IMTEQESGYCWRNFVNYSPSNEAHWPRYPHLWVRLYVLELYCIILGLPPCLNILRRKQPQLTFFTIALQSC
HYQRLPPHILWATGLKSGSETPGTSESATPESDKKYSIGLAIGTNSVGWAVITDEYKVPSKKFKVLGNTDR
HSIKKNLIGALLFDSGETAEATRLKRTARRRYTRRKNRCYLQEIFSNEMAKVDDSFFHRLEESFLVEEDKK
HERHPIFGNIVDEVAYHEKYPTIYHLRKKLVDSTDKADLRLIYLALAHMIKFRGHFLIEGDLNPDNSDVDKLF
IQLVQTYNQLFEENPINASGVDAKAILSARLSKSRRLENLIAQLPGEKKNGLFGNLIALSLGLTPNFKSNFDL
AEDAKLQLSKDTYDDDLDNLLAQIGDQYADLFLAAKNLSDAILSDILRVNTEITKAPLSASMIKRYDEHHQ
DLTLLKALVRQQLPEKYKEIFFDQSKNGYAGYIDGGASQEEFYKFIKPILEKMDGTEELLVKLNREDLLRKQ
RTFDNGSIPHQIHLGELHAILRRQEDFYPFLKDNREKIEKILTFRIPYYVGPLARGNSRFAWMTRKSEETITP
WNFEEVVDKGASAQSFIERMTNFDKNLPNEKVLPKHSLLYEYFTVYNELTKVKYVTEGMRKPAFLSGEQ
KKAIVDLLFKTNRKVTVKQLKEDYFKKIECFDSVEISGVEDRFNASLGTYHDLLKIIKDKDFLDNEENEDILE
DIVLTLTLFEDREMIEERLKTYAHLFDDKVMKQLKRRRYTGWGRLSRKLINGIRDKQSGKTILDFLKSDGFA
NRNFMQLIHDDSLTFKEDIQKAQVSGQGDSLHEHIANLAGSPAIKKGILQTVKVVDELVKVMGRHKPENIVI
EMARENQTTQKGQKNSRERMKRIEEGIKELGSQILKEHPVENTQLQNEKLYLYYLQNGRDMYVDQELDI
NRLSDYDVDHIVPQSFLKDDSIDNKVLTRSDKNRGKSDNVPSEEVVKKMKNYWRQLLNAKLITQRKFDNL
TKAERGGLSELDKAGFIKRQLVETRQITKHVAQILDSRMNTKYDENDKLIREVKVITLKSKLVSDFRKDFQF
YKVREINNYHHAHDAYLNAVVGTALIKKYPKLESEFVYGDYKVYDVRKMIAKSEQEIGKATAKYFFYSNIM
NFFKTEITLANGEIRKRPLIETNGETGEIVWDKGRDFATVRKVLSMPQVNIVKKTEVQTGGFSKESILPKRN
SDKLIARKKDWDPKKYGGFDSPTVAYSVLVVAKVEKGKSKKLKSVKELLGITIMERSSFEKNPIDFLEAKG
YKEVKKDLIIKLPKYSLFELENGRKRMLASAGELQKGNELALPSKYVNFLYLASHYEKLKGSPEDNEQKQL
FVEQHKHYLDEIIEQISEFSKRVILADANLDKVLSAYNKHRDKPIREQAENIIHLFTLTNLGAPAAFKYFDTTI
DRKRYTSTKEVLDATLIHQSITGLYETRIDLSQLGGDSGGSTNLSDIIEKETGKQLVIQESILMLPEEVEEVIG
NKPESDILVHTAYDESTDENVMLLTSDAPEYKPWALVIQDSNGENKIKMLSGGSPKKKRKV
pmCDA1-XTEN-dCas9-UGI (bacteria)
(SEQ ID NO: 382)
MTDAEYVRIHEKLDIYTFKKQFFNNKKSVSHRCYVLFELKRRGERRACFWGYAVNKPQSGTERGIHAEIFSI
RKVEEYLRDNPGQFTINWYSSWSPCADCAEKILEWYNQELRGNGHTLKIWACKLYYEKNARNQIGLWNL
RDNGVGLNVMVSEHYQCCRKIFIQSSHNQLNENRWLEKTLKRAEKRRSELSIMIQVKILHTTKSPAVSGSET
PGTSESATPESDKKYSIGLAIGTNSVGWAVITDEYKVPSKKFKVLGNTDRHSIKKNLIGALLFDSGETAEATRL
KRTARRRYTRRKNRICYLQEIFSNEMAKVDDSFFHRLEESFLVEEDKKHERHPIFGNIVDEVAYHEKYPTIYHL
RKKLVDSTDKADLRLIYLALAHMIKFRGHFLIEGDLNPDNSDVDKLFIQLVQTYNQLFEENPINASGVDAKAI
LSARLSKSRRLENLIAQLPGEKKNGLFGNLIALSLGLTPNFKSNFDLAEDAKLQLSKDTYDDDLDNLLAQIGD
QYADLFLAAKNLSDAILLSDILRVNTEITKAPLSASMIKRYDEHHQDLTLLKALVRQQLPEKYKEIFFDQSKNG
YAGYIDGGASQEEFYKFIKPILEKMDGTEELLVKLNREDLLRKQRTFDNGSIPHQIHLGELHAILRRQEDFYPF
LKDNREKIEKILTFRIPYYVGPLARGNSRFAWMTRKSEETITPWNFEEVVDKGASAQSFIERMTNFDKNLPN
EKVLPKHSLLYEYFTVYNELTKVKYVTEGMRKPAFLSGEQKKAIVDLLFKTNRKVTVKQLKEDYFKKIECFDSV
EISGVEDRFNASLGTYHDLLKIIKDKDFLDNEENEDILEDIVLTLTLFEDREMIEERLKTYAHLFDDKVMKQLK
RRRYTGWGRLSRKLINGIRDKQSGKTILDFLKSDGFANRNFMQLIHDDSLTFKEDIQKAQVSGQGDSLHEH
IANLAGSPAIKKGILQTVKVVDELVKVMGRHKPENIVIEMARENQTTQKGQKNSRERMKRIEEGIKELGSQI
LKEHPVENTQLQNEKLYLYYLQNGRDMYVDQELDINRLSDYDVDAIVPQSFLKDDSIDNKVLTRSDKNRGK
SDNVPSEEVVKKMKNYWRQLLNAKLITQRKFDNLTKAERGGLSELDKAGFIKRQLVETRQITKHVAQILDS
RMNTKYDENDKLIREVKVITLKSKLVSDFRKDFQFYKVREINNYHHAHDAYLNAVVGTALIKKYPKLESEFVY
GDYKVYDVRKMIAKSEQEIGKATAKYFFYSNIMNFFKTEITLANGEIRKRPLIETNGETGEIVWDKGRDFAT
VRKVLSMPQVNIVKKTEVQTGGFSKESILPKRNSDKLIARKKDWDPKKYGGFDSPTVAYSVLVVAKVEKGK
SKKLKSVKELLGITIMERSSFEKNPIDFLEAKGYKEVKKDLIIKLPKYSLFELENGRKRMLASAGELQKGNELAL
PSKYVNFLYLASHYEKLKGSPEDNEQKQLFVEQHKHYLDEIIEQISEFSKRVILADANLDKVLSAYNKHRDKPI
REQAENIIHLFTLTNLGAPAAFKYFDTTIDRKRYTSTKEVLDATLIHQSITGLYETRIDLSQLGGDSGGSMTNL
SDIIEKETGKQLVIQESILMLPEEVEEVIGNKPESDILVHTAYDESTDENVMLLTSDAPEYKPWALVIQDSNG
ENKIKML
pmCDA1-XTEN-nCas9-UGI-NLS (mammalian construct) (SEQ ID NO: 383):
MTDAEYVRIHEKLDIYTFKKQFFNNKKSVSHRCYVLFELKRRGERRACFWGYAVNKPQSGTERGIHAEIFSI
RKVEEYLRDNPGQFTINWYSSWSPCADCAEKILEWYNQELRGNGHTLKIWACKLYYEKNARNQIGLWNL
RDNGVGLNVMVSEHYQCCRKIFIQSSHNQLNENRWLEKTLKRAEKRRSELSIMIQVKILHTTKSPAVSGSET
PGTSESATPESDKKYSIGLAIGTNSVGWAVITDEYKVPSKKFKVLGNTDRHSIKKNLIGALLFDSGETAEATRL
KRTARRRYTRRKNRICYLQEIFSNEMAKVDDSFFHRLEESFLVEEDKKHERHPIFGNIVDEVAYHEKYPTIYHL
RKKLVDSTDKADLRLIYLALAHMIKFRGHFLIEGDLNPDNSDVDKLFIQLVQTYNQLFEENPINASGVDAKAI
LSARLSKSRRLENLIAQLPGEKKNGLFGNLIALSLGLTPNFKSNFDLAEDAKLQLSKDTYDDDLDNLLAQIGD
QYADLFLAAKNLSDAILLSDILRVNTEITKAPLSASMIKRYDEHHQDLTLLKALVRQQLPEKYKEIFFDQSKNG
YAGYIDGGASQEEFYKFIKPILEKMDGTEELLVKLNREDLLRKQRTFDNGSIPHQIHLGELHAILRRQEDFYPF
LKDNREKIEKILTFRIPYYVGPLARGNSRFAWMTRKSEETITPWNFEEVVDKGASAQSFIERMTNFDKNLPN
EKVLPKHSLLYEYFTVYNELTKVKYVTEGMRKPAFLSGEQKKAIVDLLFKTNRKVTVKQLKEDYFKKIECFDSV
EISGVEDRFNASLGTYHDLLKIIKDKDFLDNEENEDILEDIVLTLTLFEDREMIEERLKTYAHLFDDKVMKQLK
RRRYTGWGRLSRKLINGIRDKQSGKTILDFLKSDGFANRNFMQLIHDDSLTFKEDIQKAQVSGQGDSLHEH
IANLAGSPAIKKGILQTVKVVDELVKVMGRHKPENIVIEMARENQTTQKGQKNSRERMKRIEEGIKELGSQ1
LKEHPVENTQLQNEKLYLYYLQNGRDMYVDQELDINRLSDYDVDHIVPQSFLKDDSIDNKVLTRSDKNRGK
SDNVPSEEVVKKMKNYWRQLLNAKLITQRKFDNLTKAERGGLSELDKAGFIKRQLVETRQITKHVAQILDS
RMNTKYDENDKLIREVKVITLKSKLVSDFRKDFQFYKVREINNYHHAHDAYLNAVVGTALIKKYPKLESEFVY
GDYKVYDVRKMIAKSEQEIGKATAKYFFYSNIMNFFKTEITLANGEIRKRPLIETNGETGEIVWDKGRDFAT
VRKVLSMPQVNIVKKTEVQTGGFSKESILPKRNSDKLIARKKDWDPKKYGGFDSPTVAYSVLVVAKVEKGK
SKKLKSVKELLGITIMERSSFEKNPIDFLEAKGYKEVKKDLIIKLPKYSLFELENGRKRMLASAGELQKGNELAL
PSKYVNFLYLASHYEKLKGSPEDNEQKQLFVEQHKHYLDEIIEQISEFSKRVILADANLDKVLSAYNKHRDKPI
REQAENIIHLFTLTNLGAPAAFKYFDTTIDRKRYTSTKEVLDATLIHQSITGLYETRIDLSQLGGDSGGSTNLSD
IIEKETGKQLVIQESILMLPEEVEEVIGNKPESDILVHTAYDESTDENVMLLTSDAPEYKPWALVIQDSNGEN
KIKMLSGGSPKKKRKV
huAPOBEC3G-XTEN-dCas9-UGI (bacteria)
(SEQ ID NO: 384)
MDPPTFTFNFNNEPWVRGRHETYLCYEVERMHNDTWVLLNQRRGFLCNQAPHKHGFLEGRHAELCFLD
VIPFWKLDLDQDYRVTCFTSWSPCFSCAQEMAKFISKNKHVSLCIFTARIYDDQGRCQEGLRTLAEAGAKIS
IMTYSEFKHCWDTFVDHQGCPFQPWDGLDEHSQDLSGRLRAILQSGSETPGTSESATPESDKKYSIGLAIG
TNSVGWAVITDEYKVPSKKFKVLGNTDRHSIKKNLIGALLFDSGETAEATRLKRTARRRYTRRKNRICYLQEI
FSNEMAKVDDSFFHRLEESFLVEEDKKHERHPIFGNIVDEVAYHEKYPTIYHLRKKLVDSTDKADLRLIYLALA
HMIKFRGHFLIEGDLNPDNSDVDKLFIQLVQTYNQLFEENPINASGVDAKAILSARLSKSRRLENLIAQLPGE
KKNGLFGNLIALSLGLTPNFKSNFDLAEDAKLQLSKDTYDDDLDNLLAQIGDQYADLFLAAKNLSDAILLSDIL
RVNTEITKAPLSASMIKRYDEHHQDLTLLKALVRQQLPEKYKEIFFDQSKNGYAGYIDGGASQEEFYKFIKPIL
EKMDGTEELLVKLNREDLLRKQRTFDNGSIPHQIHLGELHAILRRQEDFYPFLKDNREKIEKILTFRIPYYVGP
LARGNSRFAWMTRKSEETITPWNFEEVVDKGASAQSFIERMTNFDKNLPNEKVLPKHSLLYEYFTVYNELT
KVKYVTEGMRKPAFLSGEQKKAIVDLLFKTNRKVTVKQLKEDYFKKIECFDSVEISGVEDRFNASLGTYHDLL
KIIKDKDFLDNEENEDILEDIVLTLTLFEDREMIEERLKTYAHLFDDKVMKQLKRRRYTGWGRLSRKLINGIRD
KQSGKTILDFLKSDGFANRNFMQLIHDDSLTFKEDIQKAQVSGQGDSLHEHIANLAGSPAIKKGILQTVKVV
DELVKVMGRHKPENIVIEMARENQTTQKGQKNSRERMKRIEEGIKELGSQLKEHPVENTQLQNEKLYLYY
LQNGRDMYVDQELDINRLSDYDVDAIVPQSFLKDDSIDNKVLTRSDKNRGKSDNVPSEEVVKKMKNYWR
QLLNAKLITQRKFDNLTKAERGGLSELDKAGFIKRQLVETRQITKHVAQILDSRMNTKYDENDKLIREVKVIT
LKSKLVSDFRKDFQFYKVREINNYHHAHDAYLNAVVGTALIKKYPKLESEFVYGDYKVYDVRKMIAKSEQE1
GKATAKYFFYSNIMNFFKTEITLANGEIRKRPLIETNGETGEIVWDKGRDFATVRKVLSMPQVNIVKKTEVQ
TGGFSKESILPKRNSDKLIARKKDWDPKKYGGFDSPTVAYSVLVVAKVEKGKSKKLKSVKELLGITIMERSSFE
KNPIDFLEAKGYKEVKKDLIIKLPKYSLFELENGRKRMLASAGELQKGNELALPSKYVNFLYLASHYEKLKGSP
EDNEQKQLFVEQHKHYLDEIIEQISEFSKRVILADANLDKVLSAYNKHRDKPIREQAENIIHLFTLTNLGAPAA
FKYFDTTIDRKRYTSTKEVLDATLIHQSITGLYETRIDLSQLGGDSGGSMTNLSDIIEKETGKQLVIQESILMLP
EEVEEVIGNKPESDILVHTAYDESTDENVMLLTSDAPEYKPWALVIQDSNG ENKIKML
huAPOBEC3G-XTEN-nCas9-UGI-NLS (mammalian construct)
(SEQ ID NO: 385)
MDPPTFTFNFNNEPWVRGRHETYLCYEVERMHNDTWVLLNQRRGFLCNQAPHKHGFLEGRHAELCFLD
VIPFWKLDLDQDYRVTCFTSWSPCFSCAQEMAKFISKNKHVSLCIFTARIYDDQGRCQEGLRTLAEAGAKIS
IMTYSEFKHCWDTFVDHQGCPFQPWDGLDEHSQDLSGRLRAILQSGSETPGTSESATPESDKKYSIGLAIG
TNSVGWAVITDEYKVPSKKFKVLGNTDRHSIKKNLIGALLFDSGETAEATRLKRTARRRYTRRKNRICYLQEI
FSNEMAKVDDSFFHRLEESFLVEEDKKHERHPIFGNIVDEVAYHEKYPTIYHLRKKLVDSTDKADLRLIYLALA
HMIKFRGHFLIEGDLNPDNSDVDKLFIQLVQTYNQLFEENPINASGVDAKAILSARLSKSRRLENLIAQLPGE
KKNGLFGNLIALSLGLTPNFKSNFDLAEDAKLQLSKDTYDDDLDNLLAQIGDQYADLFLAAKNLSDAILLSDIL
RVNTEITKAPLSASMIKRYDEHHQDLTLLKALVRQQLPEKYKEIFFDQSKNGYAGYIDGGASQEEFYKFIKPIL
EKMDGTEELLVKLNREDLLRKQRTFDNGSIPHQIHLGELHAILRRQEDFYPFLKDNREKIEKILTFRIPYYVGP
LARGNSRFAWMTRKSEETITPWNFEEVVDKGASAQSFIERMTNFDKNLPNEKVLPKHSLLYEYFTVYNELT
KVKYVTEGMRKPAFLSGEQKKAIVDLLFKTNRKVTVKQLKEDYFKKIECFDSVEISGVEDRFNASLGTYHDLL
KIIKDKDFLDNEENEDILEDIVLTLTLFEDREMIEERLKTYAHLFDDKVMKQLKRRRYTGWGRLSRKLINGIRD
KQSGKTILDFLKSDGFANRNFMQLIHDDSLTFKEDIQKAQVSGQGDSLHEHIANLAGSPAIKKGILQTVKVV
DELVKVMGRHKPENIVIEMARENQTTQKGQKNSRERMKRIEEGIKELGSQILKEHPVENTQLQNEKLYLYY
LQNGRDMYVDQELDINRLSDYDVDHIVPQSFLKDDSIDNKVLTRSDKNRGKSDNVPSEEVVKKMKNYWR
QLLNAKLITQRKFDNLTKAERGGLSELDKAGFIKRQLVETRQITKHVAQILDSRMNTKYDENDKLIREVKVIT
LKSKLVSDFRKDFQFYKVREINNYHHAHDAYLNAVVGTALIKKYPKLESEFVYGDYKVYDVRKMIAKSEQEI
GKATAKYFFYSNIMNFFKTEITLANGEIRKRPLIETNGETGEIVWDKGRDFATVRKVLSMPQVNIVKKTEVQ
TGGFSKESILPKRNSDKLIARKKDWDPKKYGGFDSPTVAYSVLVVAKVEKGKSKKLKSVKELLGITIMERSSFE
KNPIDFLEAKGYKEVKKDLIIKLPKYSLFELENGRKRMLASAGELQKGNELALPSKYVNFLYLASHYEKLKGSP
EDNEQKQLFVEQHKHYLDEIIEQISEFSKRVILADANLDKVLSAYNKHRDKPIREQAENIIHLFTLTNLGAPAA
FKYFDTTIDRKRYTSTKEVLDATLIHQSITGLYETRIDLSQLGGDSGGSTNLSDIIEKETGKQLVIQESILMLPEE
VEEVIGNKPESDILVHTAYDESTDENVMLLTSDAPEYKPWALVIQDSNGENKIKMLSGGSPKKKRKV
huAPOBEC3G (D316R_D317R)-XTEN-nCas9-UGI-NLS (mammalian construct)
(SEQ ID NO: 386)
MDPPTFTFNFNNEPWVRGRHETYLCYEVERMHNDTWVLLNQRRGFLCNQAPHKHGFLEGRHAELCFLD
VIPFWKLDLDQDYRVTCFTSWSPCFSCAQEMAKFISKNKHVSLCIFTARIYRRQGRCQEGLRTLAEAGAKISI
MTYSEFKHCWDTFVDHQGCPFQPWDGLDEHSQDLSGRLRAILQSGSETPGTSESATPESDKKYSIGLAIGT
NSVGWAVITDEYKVPSKKFKVLGNTDRHSIKKNLIGALLFDSGETAEATRLKRTARRRYTRRKNRICYLQEIFS
NEMAKVDDSFFHRLEESFLVEEDKKHERHPIFGNIVDEVAYHEKYPTIYHLRKKLVDSTDKADLRLIYLALAH
MIKFRGHFLIEGDLNPDNSDVDKLFIQLVQTYNQLFEENPINASGVDAKAILSARLSKSRRLENLIAQLPGEK
KNGLFGNLIALSLGLTPNFKSNFDLAEDAKLQLSKDTYDDDLDNLLAQIGDQYADLFLAAKNLSDAILLSDILR
VNTEITKAPLSASMIKRYDEHHQDLTLLKALVRQQLPEKYKEIFFDQSKNGYAGYIDGGASQEEFYKFIKPILE
KMDGTEELLVKLNREDLLRKQRTFDNGSIPHQIHLGELHAILRRQEDFYPFLKDNREKIEKILTFRIPYYVGPL
ARGNSRFAWMTRKSEETITPWNFEEVVDKGASAQSFIERMTNFDKNLPNEKVLPKHSLLYEYFTVYNELTK
VKYVTEGMRKPAFLSGEQKKAIVDLLFKTNRKVTVKQLKEDYFKKIECFDSVEISGVEDRFNASLGTYHDLLK
IIKDKDFLDNEENEDILEDIVLTLTLFEDREMIEERLKTYAHLFDDKVMKQLKRRRYTGWGRLSRKLINGIRDK
QSGKTILDFLKSDGFANRNFMQLIHDDSLTFKEDIQKAQVSGQGDSLHEHIANLAGSPAIKKGILQTVKVVD
ELVKVMGRHKPENIVIEMARENQTTQKGQKNSRERMKRIEEGIKELGSQILKEHPVENTQLQNEKLYLYYL
QNGRDMYVDQELDINRLSDYDVDHIVPQSFLKDDSIDNKVLTRSDKNRGKSDNVPSEEVVKKMKNYWR
QLLNAKLITQRKFDNLTKAERGGLSELDKAGFIKRQLVETRQITKHVAQILDSRMNTKYDENDKLIREVKVIT
LKSKLVSDFRKDFQFYKVREINNYHHAHDAYLNAVVGTALIKKYPKLESEFVYGDYKVYDVRKMIAKSEQE1
GKATAKYFFYSNIMNFFKTEITLANGEIRKRPLIETNGETGEIVWDKGRDFATVRKVLSMPQVNIVKKTEVQ
TGGFSKESILPKRNSDKLIARKKDWDPKKYGGFDSPTVAYSVLVVAKVEKGKSKKLKSVKELLGITIMERSSFE
KNPIDFLEAKGYKEVKKDLIIKLPKYSLFELENGRKRMLASAGELQKGNELALPSKYVNFLYLASHYEKLKGSP
EDNEQKQLFVEQHKHYLDEIIEQISEFSKRVILADANLDKVLSAYNKHRDKPIREQAENIIHLFTLTNLGAPAA
FKYFDTTIDRKRYTSTKEVLDATLIHQSITGLYETRIDLSQLGGDSGGSTNLSDIIEKETGKQLVIQESILMLPEE
VEEVIGNKPESDILVHTAYDESTDENVMLLTSDAPEYKPWALVIQDSNGENKIKMLSGGSPKKKRKV

### Example 2: OtRNAs and ORSes

TABLE 3
Non-limiting Examples of OtRNA and ORS Sequences

| | | SEQ |
|---|---|---|
| | Sequence | ID NO |
| M. jannaschii | CCGGCGGTAGTTCAGCAGGGCAGAACGGCGGACTCTAAAT | 5 |
| mtRNA^{Tyr}-CUA | CCGCATGGCGCTGGTTCAAATCCGGCCCGCCGGACCA | |
| HLAD03, an | CCCAGGGTAGCCAAGCTCGGCCAACGGCGACGGACTCTAA | 6 |
| optimized amber | ATCCGTTCTCGTAGGAGTTCGAGGGTTCGAATCCCTTCCCT | |
| suppressor tNRA | GGGACCA | |
| HL325A, an | GCGAGGGTAGCCAAGCTCGGCCAACGGCGACGGACTTCCT | 7 |
| optimized AGGA | AATCCGTTCTCGTAGGAGTTCGAGGGTTCGAATCCCTCCCC | |
| frameshift tRNA | TCGCACCA | |
| mutant TryRS | ATGGACGAATTTGAAATGATAAAGAGAAACACATCTGAAA | 299 |
| (LWJ16) | TTATCAGCGAGGAAGAGTTAAGAGAGGTTTTAAAAAAAGA | |
| | TGAAAAATCTGCTCAGATAGGTTTTGAACCAAGTGGTAAA | |
| | ATACATTTAGGGCATTATCTCCAAATAAAAAAGATGATTGA | |
| | TTTACAAAATGCTGGATTTGATATAATTATATTGTTGGCTG | |
| | ATTTACACGCCTATTTAAACCAGAAAGGAGAGTTGGATGA | |
| | GATTAGAAAAATAGGAGATTATAACAAAAAAGTTTTTGAA | |
| | GCAATGGGGTTAAAGGCAAAATATGTTTATGGAAGTACTTT | |
| | CCAGCTTGATAAGGATTATACACTGAATGTCTATAGATTGG | |
| | CTTTAAAAACTACCTTAAAAAGAGCAAGAAGGAGTATGGA | |
| | ACTTATAGCAAGAGAGGATGAAAATCCAAAGGTTGCTGAA | |
| | GTTATCTATCCAATAATGCAGGTTAATGCAATTCATTATCC | |
| | TGGCGTTGATGTTGCAGTTGGAGGGATGGAGCAGAGAAAA | |
| | ATACACATGTTAGCAAGGGAGCTTTTACCAAAAAAGGTTGT | |
| | TTGTATTCACAACCCTGTCTTAACGGGTTTGGATGGAGAAG | |
| | GGAAGATGAGTTCTTCAAAAGGGAATTTTATAGCTGTTGAT | |
| | GACTCTCCAGAAGAGATTAGGGCTAAGATAAAGAAAGCAT | |
| | ACTGCCCAGCTGGAGTTGTTGAAGGAAATCCAATAATGGA | |
| | GATAGCTAAATACTTCCTTGAATATCCTTTAACCATAAAAA | |
| | GGCCAGAAAAATTTGGTGGAGATTTGACAGTTAGTAGCTAT | |
| | GAGGAGTTAGAGAGTTTATTTAAAAATAAGGAATTGCATC | |
| | CAATGGATTTAAAAAATGCTGTAGCTGAAGAACTTATAAA | |
| | GATTTTAGAGCCAATTAGAAAGAGATTATAA | |
| p-iPr-PheRS | ATGGACGAATTTGAAATGATAAAGAGAAACACATCTGAAA | 300 |
| | TTATCAGCGAGGAAGAGTTAAGAGAGGTTTTAAAAAAAGA | |
| | TGAAAAATCTGCTGGGATAGGTTTTGAACCAAGTGGTAAA | |
| | ATACATTTAGGGCATTATCTCCAAATAAAAAAGATGATTGA | |
| | TTTACAAAATGCTGGATTTGATATAATTATATTGTTGGCTG | |
| | ATTTACACGCCTATTTAAACCAGAAAGGAGAGTTGGATGA | |
| | GATTAGAAAAATAGGAGATTATAACAAAAAAGTTTTTGAA | |
| | GCAATGGGGTTAAAGGCAAAATGTGCTTATGGAAGTCCTTT | |
| | CCAGCTTGATAAGGATTATACACTGAATGTCTATAGATTGG | |
| | CTTTAAAAACTACCTTAAAAAGAGCAAGAAGGAGTATGGA | |
| | ACTTATAGAAGAGAGGATGAAAATCCAAAGGTTGCTGAAG | |
| | TTATCTATCCAATAATGCAGGTTAATGGTTATCATTATCTTG | |
| | GCGTTGATGTTGCAGTTGGAGGGATGGAGCAGAGAAAAAT | |
| | ACACATGTTAGCAAGGGAGCTTTTACCAAAAAAGGTTGTTT | |
| | GTATTCACAACCCTGTCTTAACGGGTTTGGATGGAGAAGGA | |
| | AAGATGAGTTCTTCAAAAGGGAATTTTATAGCTGTTGATGA | |
| | CTCTCCAGAAGAGATTAGGGCTAAGATAAAGAAAGCATAC | |
| | TGCCCAGCTGGAGTTGTTGAAGGAAATCCAATAATGGAGA | |
| | TAGCTAAATACTTCCTTGAATATCCTTTAACCATAAAAAGG | |
| | CCAGAAAAATTTGGTGGAGATTTGACAGTTAATAGCTATGA | |
| | GGAGTTAGAGAGTTTATTTAAAAATAAGGAATTGCATCCA | |
| | ATGGATTTAAAAAATGCTGTAGCTGAAGAACTTATAAAGA | |
| | TTTTAGAGCCAATTAGAAAGAGATTA | |
| p-NH₂-PheRS(1) | ATGGACGAATTTGAAATGATAAAGAGAAACACATCTGAAA | 301 |
| | TTATCAGCGAGGAAGAGTTAAGAGAGGTTTTAAAAAAAGA | |
| | TGAAAAATCTGCTCAGATAGGTTTTGAACCAAGTGGTAAA | |
| | ATACATTTAGGGCATTATCTCCAAATAAAAAAGATGATTGA | |
| | TTTACAAAATGCTGGATTTGATATAATTATATTGTTGGCTG | |
| | ATTTACACGCCTATTTAAACCAGAAAGGAGAGTTGGATGA | |
| | GATTAGAAAAATAGGAGATTATAACAAAAAAGTTTTTGAA | |
| | GCAATGGGGTTAAAGGCAAAATATGTTTATGGAAGTCCTTT | |
| | CCAGCTTGATAAGGATTATACACTGAATGTCTATAGATTGG | |
| | CTTTAAAAACTACCTTAAAAAGAGCAAGAAGGAGTATGGA | |
| | ACTTATAGAAGAGAGGATGAAAATCCAAAGGTTGCTGAAG | |
| | TTATCTATCCAATAATGCAGGTTAATTGTTCTCATTATTATG | |
| | GCGTTGATGTTGCAGTTGGAGGGATGGAGCAGAGAAAAAT | |
| | ACACATGTTAGCAAGGGAGCTTTTACCAAAAAAGGTTGTTT | |
| | GTATTCACAACCCTGTCTTAACGGGTTTGGATGGAGAAGGA | |
| | AAGATGAGTTCTTCAAAAGGGAATTTTATAGCTGTTGATGA | |
| | CTCTCCAGAAGAGATTAGGGCTAAGATAAAGAAAGCATAC | |
| | TGCCCAGCTGGAGTTGTTGAAGGAAATCCAATAATGGAGA | |
| | TAGCTAAATACTTCCTTGAATATCCTTTAACCATAAAAAGG | |
| | CCAGAAAAATTTGGTGGAGATTTGACAGTTAATAGCTATGA | |
| | GGAGTTAGAGAGTTTATTTAAAAATAAGGAATTGCATCCA | |
| | ATGGATTTAAAAAATGCTGTAGCTGAAGAACTTATAAAGA | |
| | TTTTAGAGCCAATTAGAAAGAGATTA | |
| p-NH₂-PheRS(2) | ATGGACGAATTTGAAATGATAAAGAGAAACACATCTGAAA | 302 |
| | TTATCAGCGAGGAAGAGTTAAGAGAGGTTTTAAAAAAAGA | |
| | TGAAAAATCTGCTACTATAGGTTTTGAACCAAGTGGTAAAA | |
| | TACATTTAGGGCATTATCTCCAAATAAAAAAGATGATTGAT | |
| | TTACAAAATGCTGGATTTGATATAATTATATTGTTGGCTGA | |
| | TTTACACGCCTATTTAAACCAGAAAGGAGAGTTGGATGAG | |
| | ATTAGAAAAATAGGAGATTATAACAAAAAAGTTTTTGAAG | |
| | CAATGGGGTTAAAGGCAAAATATGTTTATGGAAGTACGTTC | |
| | CAGCTTGATAAGGATTATACACTGAATGTCTATAGATTGGC | |
| | TTTAAAAACTACCTTAAAAAGAGCAAGAAGGAGTATGGAA | |
| | CTTATAGAAGAGAGGATGAAAATCCAAAGGTTGCTGAAGT | |
| | TATCTATCCAATAATGCAGGTTAATCCGTTGCATTATGCTG | |
| | GCGTTGATGTTGCAGTTGGAGGGATGGAGCAGAGAAAAAT | |
| | ACACATGTTAGCAAGGGAGCTTTTACCAAAAAAGGTTGTTT | |
| | GTATTCACAACCCTGTCTTAACGGGTTTGGATGGAGAAGGA | |
| | AAGATGAGTTCTTCAAAAGGGAATTTTATAGCTGTTGATGA | |
| | CTCTCCAGAAGAGATTAGGGCTAAGATAAAGAAAGCATAC | |
| | TGCCCAGCTGGAGTTGTTGAAGGAAATCCAATAATGGAGA | |
| | TAGCTAAATACTTCCTTGAATATCCTTTAACCATAAAAAGG | |
| | CCAGAAAAATTTGGTGGAGATTTGACAGTTAATAGCTATGA | |
| | GGAGTTAGAGAGTTTATTTAAAAATAAGGAATTGCATCCA | |
| | ATGGATTTAAAAAATGCTGTAGCTGAAGAACTTATAAAGA | |
| | TTTTAGAGCCAATTAGAAAGAGATTA | |
| p-NH₂-PheRS(3a) | ATGGACGAATTTGAAATGATAAAGAGAAACACATCTGAAA | 303 |
| | TTATCAGCGAGGAAGAGTTAAGAGAGGTTTTAAAAAAAGA | |
| | TGAAAAATCTGCTCATATAGGTTTTGAACCAAGTGGTAAAA | |
| | TACATTTAGGGCATTATCTCCAAATAAAAAAGATGATTGAT | |
| | TTACAAAATGCTGGATTTGATATAATTATATTGTTGGCTGA | |
| | TTTACACGCCTATTTAAACCAGAAAGGAGAGTTGGATGAG | |
| | ATTAGAAAAATAGGAGATTATAACAAAAAAGTTTTTGAAG | |
| | CAATGGGGTTAAAGGCAAAATATGTTTATGGAAGTGAGTT | |
| | CCAGCTTGATAAGGATTATACACTGAATGTCTATAGATTGG | |
| | CTTTAAAAACTACCTTAAAAAGAGCAAGAAGGAGTATGGA | |
| | ACTTATAGAAGAGAGGATGAAAATCCAAAGGTTGCTGAAG | |
| | TTATCTATCCAATAATGCAGGTTAATCGGCCGCATTATCCT | |
| | GGCGTTGATGTTGCAGTTGGAGGGATGGAGCAGAGAAAAA | |
| | TACACATGTTAGCAAGGGAGCTTTTACCAAAAAAGGTTGTT | |
| | TGTATTCACAACCCTGTCTTAACGGGTTTGGATGGAGAAGG | |
| | AAAGATGAGTTCTTCAAAAGGGAATTTTATAGCTGTTGATG | |
| | ACTCTCCAGAAGAGATTAGGGCTAAGATAAAGAAAGCATA | |
| | CTGCCCAGCTGGAGTTGTTGAAGGAAATCCAATAATGGAG | |
| | ATAGCTAAATACTTCCTTGAATATCCTTTAACCATAAAAAG | |
| | GCCAGAAAAATTTGGTGGAGATTTGACAGTTAATAGCTATG | |
| | AGGAGTTAGAGAGTTTATTTAAAAATAAGGAATTGCATCC | |
| | AATGGATTTAAAAAATGCTGTAGCTGAAGAACTTATAAAG | |
| | ATTTTAGAGCCAATTAGAAAGAGATTA | |
| p-NH₂-PheRS(3b) | ATGGACGAATTTGAAATGATAAAGAGAAACACATCTGAAA | 304 |
| | TTATCAGCGAGGAAGAGTTAAGAGAGGTTTTAAAAAAAGA | |
| | TGAAAAATCTGCTTATATAGGTTTTGAACCAAGTGGTAAAA | |
| | TACATTTAGGGCATTATCTCCAAATAAAAAAGATGATTGAT | |
| | TTACAAAATGCTGGATTTGATATAATTATATTGTTGGCTGA | |
| | TTTACACGCCTATTTAAACCAGAAAGGAGAGTTGGATGAG | |
| | ATTAGAAAAATAGGAGATTATAACAAAAAAGTTTTTGAAG | |
| | CAATGGGGTTAAAGGCAAAATATGTTTATGGAAGTCCTTTC | |
| | CAGCTTGATAAGGATTATACACTGAATGTCTATAGATTGGC | |
| | TTTAAAAACTACCTTAAAAAGAGCAAGAAGGAGTATGGAA | |
| | CTTATAGAAGAGAGGATGAAAATCCAAAGGTTGCTGAAGT | |
| | TATCTATCCAATAATGCAGGTTAATCAGAGTCATTATGATG | |
| | GCGTTGATGTTGCAGTTGGAGGGATGGAGCAGAGAAAAAT | |
| | ACACATGTTAGCAAGGGAGCTTTTACCAAAAAAGGTTGTTT | |
| | GTATTCACAACCCTGTCTTAACGGGTTTGGATGGAGAAGGA | |
| | AAGATGAGTTCTTCAAAAGGGAATTTTATAGCTGTTGATGA | |
| | CTCTCCAGAAGAGATTAGGGCTAAGATAAAGAAAGCATAC | |
| | TGCCCAGCTGGAGTTGTTGAAGGAAATCCAATAATGGAGA | |
| | TAGCTAAATACTTCCTTGAATATCCTTTAACCATAAAAAGG | |
| | CCAGAAAAATTTGGTGGAGATTTGACAGTTAATAGCTATGA | |
| | GGAGTTAGAGAGTTTATTTAAAAATAAGGAATTGCATCCA | |
| | ATGGATTTAAAAAATGCTGTAGCTGAAGAACTTATAAAGA | |
| | TTTTAGAGCCAATTAGAAAGAGATTA | |
| O-Allyl-TyrRS(1) | ATGGACGAATTTGAAATGATAAAGAGAAACACATCTGAAA | 305 |
| | TTATCAGCGAGGAAGAGTTAAGAGAGGTTTTAAAAAAAGA | |
| | TGAAAAATCTGCTTCGATAGGTTTTGAACCAAGTGGTAAAA | |
| | TACATTTAGGGCATTATCTCCAAATAAAAAAGATGATTGAT | |
| | TTACAAAATGCTGGATTTGATATAATTATATTGTTGGCTGA | |
| | TTTACACGCCTATTTAAACCAGAAAGGAGAGTTGGATGAG | |
| | ATTAGAAAAATAGGAGATTATAACAAAAAAGTTTTTGAAG | |
| | CAATGGGGTTAAAGGCAAAATATGTTTATGGAAGTACGTTC | |
| | CAGCTTGATAAGGATTATACACTGAATGTCTATAGATTGGC | |
| | TTTAAAAACTACCTTAAAAAGAGCAAGAAGGAGTATGGAA | |
| | CTTATAGAAGAGAGGATGAAAATCCAAAGGTTGCTGAAGT | |
| | TATCTATCCAATAATGCAGGTTAATACGTATCATTATGCTG | |
| | GCGTTGATGTTGCAGTTGGAGGGATGGAGCAGAGAAAAAT | |
| | ACACATGTTAGCAAGGGAGCTTTTACCAAAAAAGGTTGTTT | |
| | GTATTCACAACCCTGTCTTAACGGGTTTGGATGGAGAAGGA | |
| | AAGATGAGTTCTTCAAAAGGGAATTTTATAGCTGTTGATGA | |
| | CTCTCCAGAAGAGATTAGGGCTAAGATAAAGAAAGCATAC | |
| | TGCCCAGCTGGAGTTGTTGAAGGAAATCCAATAATGGAGA | |
| | TAGCTAAATACTTCCTTGAATATCCTTTAACCATAAAAAGG | |
| | CCAGAAAAATTTGGTGGAGATTTGACAGTTAATAGCTATGA | |
| | GGAGTTAGAGAGTTTATTTAAAAATAAGGAATTGCATCCA | |
| | ATGGATTTAAAAAATGCTGTAGCTGAAGAACTTATAAAGA | |
| | TTTTAGAGCCAATTAGAAAGAGATTA | |
| O-Allyl-TyrRS(3) | ATGGACGAATTTGAAATGATAAAGAGAAACACATCTGAAA | 306 |
| | TTATCAGCGAGGAAGAGTTAAGAGAGGTTTTAAAAAAAGA | |
| | TGAAAAATCTGCTCCTATAGGTTTTGAACCAAGTGGTAAAA | |
| | TACATTTAGGGCATTATCTCCAAATAAAAAAGATGATTGAT | |
| | TTACAAAATGCTGGATTTGATATAATTATATTGTTGGCTGA | |
| | TTTACACGCCTATTTAAACCAGAAAGGAGAGTTGGATGAG | |
| | ATTAGAAAAATAGGAGATTATAACAAAAAAGTTTTTGAAG | |
| | CAATGGGGTTAAAGGCAAAATATGTTTATGGAAGTATGTTC | |
| | CAGCTTGATAAGGATTATACACTGAATGTCTATAGATTGGC | |
| | TTTAAAAACTACCTTAAAAAGAGCAAGAAGGAGTATGGAA | |
| | CTTATAGAAGAGAGGATGAAAATCCAAAGGTTGCTGAAGT | |
| | TATCTATCCAATAATGCAGGTTAATAATACGCATTATGGGG | |
| | GCGTTGATGTTGCAGTTGGAGGGATGGAGCAGAGAAAAAT | |
| | ACACATGTTAGCAAGGGAGCTTTTACCAAAAAAGGTTGTTT | |
| | GTATTCACAACCCTGTCTTAACGGGTTTGGATGGAGAAGGA | |
| | AAGATGAGTTCTTCAAAAGGGAATTTTATAGCTGTTGATGA | |
| | CTCTCCAGAAGAGATTAGGGCTAAGATAAAGAAAGCATAC | |
| | TGCCCAGCTGGAGTTGTTGAAGGAAATCCAATAATGGAGA | |
| | TAGCTAAATACTTCCTTGAATATCCTTTAACCATAAAAAGG | |
| | CCAGAAAAATTTGGTGGAGATTTGACAGTTAATAGCTATGA | |
| | GGAGTTAGAGAGTTTATTTAAAAATAAGGAATTGCATCCA | |
| | ATGGATTTAAAAAATGCTGTAGCTGAAGAACTTATAAAGA | |
| | TTTTAGAGCCAATTAGAAAGAGATTA | |
| O-Allyl-TyrRS(4) | ATGGACGAATTTGAAATGATAAAGAGAAACACATCTGAAA | 307 |
| | TTATCAGCGAGGAAGAGTTAAGAGAGGTTTTAAAAAAAGA | |
| | TGAAAAATCTGCTACGATAGGTTTTGAACCAAGTGGTAAA | |
| | ATACATTTAGGGCATTATCTCCAAATAAAAAAGATGATTGA | |
| | TTTACAAAATGCTGGATTTGATATAATTATATTGTTGGCTG | |
| | ATTTACACGCCTATTTAAACCAGAAAGGAGAGTTGGATGA | |
| | GATTAGAAAAATAGGAGATTATAACAAAAAAGTTTTTGAA | |
| | GCAATGGGGTTAAAGGCAAAATATGTTTATGGAAGTCATTT | |
| | CCAGCTTGATAAGGATTATACACTGAATGTCTATAGATTGG | |
| | CTTTAAAAACTACCTTAAAAAGAGCAAGAAGGAGTATGGA | |
| | ACTTATAGAAGAGAGGATGAAAATCCAAAGGTTGCTGAAG | |
| | TTATCTATCCAATAATGCAGGTTAATCAGACTCATTATGAG | |
| | GGCGTTGATGTTGCAGTTGGAGGGATGGAGCAGAGAAAAA | |
| | TACACATGTTAGCAAGGGAGCTTTTACCAAAAAAGGTTGTT | |
| | TGTATTCACAACCCTGTCTTAACGGGTTTGGATGGAGAAGG | |
| | AAAGATGAGTTCTTCAAAAGGGAATTTTATAGCTGTTGATG | |
| | ACTCTCCAGAAGAGATTAGGGCTAAGATAAAGAAAGCATA | |
| | CTGCCCAGCTGGAGTTGTTGAAGGAAATCCAATAATGGAG | |
| | ATAGCTAAATACTTCCTTGAATATCCTTTAACCATAAAAAG | |
| | GCCAGAAAAATTTGGTGGAGATTTGACAGTTAATAGCTATG | |
| | AGGAGTTAGAGAGTTTATTTAAAAATAAGGAATTGCATCC | |
| | AATGGATTTAAAAAATGCTGTAGCTGAAGAACTTATAAAG | |
| | ATTTTAGAGCCAATTAGAAAGAGATTA | |
| p-Br-PheRS | ATGGACGAATTTGAAATGATAAAGAGAAACACATCTGAAA | 308 |
| | TTATCAGCGAGGAAGAGTTAAGAGAGGTTTTAAAAAAAGA | |
| | TGAAAAATCTGCTCATATAGGTTTTGAACCAAGTGGTAAAA | |
| | TACATTTAGGGCATTATCTCCAAATAAAAAAGATGATTGAT | |
| | TTACAAAATGCTGGATTTGATATAATTATATTGTTGGCTGA | |
| | TTTACACGCCTATTTAAACCAGAAAGGAGAGTTGGATGAG | |
| | ATTAGAAAAATAGGAGATTATAACAAAAAAGTTTTTGAAG | |
| | CAATGGGGTTAAAGGCAAAATATGTTTATGGAAGTAAGTT | |
| | CCAGCTTGATAAGGATTATACACTGAATGTCTATAGATTGG | |
| | CTTTAAAAACTACCTTAAAAAGAGCAAGAAGGAGTATGGA | |
| | ACTTATAGAAGAGAGGATGAAAATCCAAAGGTTGCTGAAG | |
| | TTATCTATCCAATAATGCAGGTTAATCCGTGTCATTATCAT | |
| | GGCGTTGATGTTGCAGTTGGAGGGATGGAGCAGAGAAAAA | |
| | TACACATGTTAGCAAGGGAGCTTTTACCAAAAAAGGTTGTT | |
| | TGTATTCACAACCCTGTCTTAACGGGTTTGGATGGAGAAGG | |
| | AAAGATGAGTTCTTCAAAAGGGAATTTTATAGCTGTTGATG | |
| | ACTCTCCAGAAGAGATTAGGGCTAAGATAAAGAAAGCATA | |
| | CTGCCCAGCTGGAGTTGTTGAAGGAAATCCAATAATGGAG | |
| | ATAGCTAAATACTTCCTTGAATATCCTTTAACCATAAAAAG | |
| | GCCAGAAAAATTTGGTGGAGATTTGACAGTTAATAGCTATG | |
| | AGGAGTTAGAGAGTTTATTTAAAAATAAGGAATTGCATCC | |
| | AATGGATTTAAAAAATGCTGTAGCTGAAGAACTTATAAAG | |
| | ATTTTAGAGCCAATTAGAAAGAGATTA | |
| p-Az-PheRS(1) | ATGGACGAATTTGAAATGATAAAGAGAAACACATCTGAAA | 309 |
| | TTATCAGCGAGGAAGAGTTAAGAGAGGTTTTAAAAAAAGA | |
| | TGAAAAATCTGCTGCTATAGGTTTTGAACCAAGTGGTAAAA | |
| | TACATTTAGGGCATTATCTCCAAATAAAAAAGATGATTGAT | |
| | TTACAAAATGCTGGATTTGATATAATTATATTGTTGGCTGA | |
| | TTTACACGCCTATTTAAACCAGAAAGGAGAGTTGGATGAG | |
| | ATTAGAAAAATAGGAGATTATAACAAAAAAGTTTTTGAAG | |
| | CAATGGGGTTAAAGGCAAAATATGTTTATGGAAGTCGGTTC | |
| | CAGCTTGATAAGGATTATACACTGAATGTCTATAGATTGGC | |
| | TTTAAAAACTACCTTAAAAAGAGCAAGAAGGAGTATGGAA | |
| | CTTATAGAAGAGAGGATGAAAATCCAAAGGTTGCTGAAGT | |
| | TATCTATCCAATAATGCAGGTTAATGTGATTCATTATGATG | |
| | GCGTTGATGTTGCAGTTGGAGGGATGGAGCAGAGAAAAAT | |
| | ACACATGTTAGCAAGGGAGCTTTTACCAAAAAAGGTTGTTT | |
| | GTATTCACAACCCTGTCTTAACGGGTTTGGATGGAGAAGGA | |
| | AAGATGAGTTCTTCAAAAGGGAATTTTATAGCTGTTGATGA | |
| | CTCTCCAGAAGAGATTAGGGCTAAGATAAAGAAAGCATAC | |
| | TGCCCAGCTGGAGTTGTTGAAGGAAATCCAATAATGGAGA | |
| | TAGCTAAATACTTCCTTGAATATCCTTTAACCATAAAAAGG | |
| | CCAGAAAAATTTGGTGGAGATTTGACAGTTAATAGCTATGA | |
| | GGAGTTAGAGAGTTTATTTAAAAATAAGGAATTGCATCCA | |
| | ATGGATTTAAAAAATGCTGTAGCTGAAGAACTTATAAAGA | |
| | TTTTAGAGCCAATTAGAAAGAGATTA | |
| p-Az-PheRS(3) | ATGGACGAATTTGAAATGATAAAGAGAAACACATCTGAAA | 310 |
| | TTATCAGCGAGGAAGAGTTAAGAGAGGTTTTAAAAAAAGA | |
| | TGAAAAATCTGCTGGGATAGGTTTTGAACCAAGTGGTAAA | |
| | ATACATTTAGGGCATTATCTCCAAATAAAAAAGATGATTGA | |
| | TTTACAAAATGCTGGATTTGATATAATTATATTGTTGGCTG | |
| | ATTTACACGCCTATTTAAACCAGAAAGGAGAGTTGGATGA | |
| | GATTAGAAAAATAGGAGATTATAACAAAAAAGTTTTTGAA | |
| | GCAATGGGGTTAAAGGCAAAATATGTTTATGGAAGTACTTT | |
| | CCAGCTTGATAAGGATTATACACTGAATGTCTATAGATTGG | |
| | CTTTAAAAACTACCTTAAAAAGAGCAAGAAGGAGTATGGA | |
| | ACTTATAGAAGAGAGGATGAAAATCCAAAGGTTGCTGAAG | |
| | TTATCTATCCAATAATGCAGGTTAATACGTATTATTATGCT | |
| | GGCGTTGATGTTGCAGTTGGAGGGATGGAGCAGAGAAAAA | |
| | TACACATGTTAGCAAGGGAGCTTTTACCAAAAAAGGTTGTT | |
| | TGTATTCACAACCCTGTCTTAACGGGTTTGGATGGAGAAGG | |
| | AAAGATGAGTTCTTCAAAAGGGAATTTTATAGCTGTTGATG | |
| | ACTCTCCAGAAGAGATTAGGGCTAAGATAAAGAAAGCATA | |
| | CTGCCCAGCTGGAGTTGTTGAAGGAAATCCAATAATGGAG | |
| | ATAGCTAAATACTTCCTTGAATATCCTTTAACCATAAAAAG | |
| | GCCAGAAAAATTTGGTGGAGATTTGACAGTTAATAGCTATG | |
| | AGGAGTTAGAGAGTTTATTTAAAAATAAGGAATTGCATCC | |
| | AATGGATTTAAAAAATGCTGTAGCTGAAGAACTTATAAAG | |
| | ATTTTAGAGCCAATTAGAAAGAGATTA | |
| p-Az-PheRS(5) | ATGGACGAATTTGAAATGATAAAGAGAAACACATCTGAAA | 311 |
| | TTATCAGCGAGGAAGAGTTAAGAGAGGTTTTAAAAAAAGA | |
| | TGAAAAATCTGCTCTGATAGGTTTTGAACCAAGTGGTAAAA | |
| | TACATTTAGGGCATTATCTCCAAATAAAAAAGATGATTGAT | |
| | TTACAAAATGCTGGATTTGATATAATTATATTGTTGGCTGA | |
| | TTTACACGCCTATTTAAACCAGAAAGGAGAGTTGGATGAG | |
| | ATTAGAAAAATAGGAGATTATAACAAAAAAGTTTTTGAAG | |
| | CAATGGGGTTAAAGGCAAAATATGTTTATGGAAGTCCGTTC | |
| | CAGCTTGATAAGGATTATACACTGAATGTCTATAGATTGGC | |
| | TTTAAAAACTACCTTAAAAAGAGCAAGAAGGAGTATGGAA | |
| | CTTATAGAAGAGAGGATGAAAATCCAAAGGTTGCTGAAGT | |
| | TATCTATCCAATAATGCAGGTTAATCAGATTCATTCTAGTG | |
| | GCGTTGATGTTGCAGTTGGAGGGATGGAGCAGAGAAAAAT | |
| | ACACATGTTAGCAAGGGAGCTTTTACCAAAAAAGGTTGTTT | |
| | GTATTCACAACCCTGTCTTAACGGGTTTGGATGGAGAAGGA | |
| | AAGATGAGTTCTTCAAAAGGGAATTTTATAGCTGTTGATGA | |
| | CTCTCCAGAAGAGATTAGGGCTAAGATAAAGAAAGCATAC | |
| | TGCCCAGCTGGAGTTGTTGAAGGAAATCCAATAATGGAGA | |
| | TAGCTAAATACTTCCTTGAATATCCTTTAACCATAAAAAGG | |
| | CCAGAAAAATTTGGTGGAGATTTGACAGTTAATAGCTATGA | |
| | GGAGTTAGAGAGTTTATTTAAAAATAAGGAATTGCATCCA | |
| | ATGGATTTAAAAAATGCTGTAGCTGAAGAACTTATAAAGA | |
| | TTTTAGAGCCAATTAGAAAGAGATTA | |
| mutant ORS to | ATGGACGAATTTGAAATGATAAAGAGAAACACATCTGAAA | 312 |
| incorporate m-acyl | TTATCAGCGAGGAAGAGTTAAGAGAGGTTTTAAAAAAAGA | |
| phenylalanine into | TGAAAAATCTGCTGACATAGGTTTTGAACCAAGTGGTAAA | |
| proteins (ketone 3-4) | ATACATTTAGGGCATTATCTCCAAATAAAAAAGATGATTGA | |
| | TTTACAAAATGCTGGATTTGATATAATTATATTGTTGGCTG | |
| | ATTTACACGCCTATTTAAACCAGAAAGGAGAGTTGGATGA | |
| | GATTAGAAAAATAGGAGATTATAACAAAAAAGTTTTTGAA | |
| | GCAATGGGGTTAAAGGCAAAATATGTTTATGGAAGTGAAT | |
| | TCCAGCTTGATAAGGATTATACACTGAATGTCTATAGATTG | |
| | GCTTTAAAAACTACCTTAAAAAGAGCAAGAAGGAGTATGG | |
| | AACTTATAGCAAGAGAGGATGAAAATCCAAAGGTTGCTGA | |
| | AGTTATCTATCCAATAATGCAGGTTAATGGAATGCATTATC | |
| | AAGGCGTTGATGTTGCAGTTGGAGGGATGGAGCAGAGAAA | |
| | AATACACATGTTAGCAAGGGAGCTTTTACCAAAAAAGGTT | |
| | GTTTGTATTCACAACCCTGTCTTAACGGGTTTGGATGGAGA | |
| | AGGAAAGATGAGTTCTTCAAAAGGGAATTTTATAGCTGTTG | |
| | ATGACTCTCCAGAAGAGATTAGGGCTAAGATAAAGAAAGC | |
| | ATACTGCCCAGCTGGAGTTGTTGAAGGAAATCCAATAATG | |
| | GAGATAGCTAAATACTTCCTTGAATATCCTTTAACCATAAA | |
| | AAGGCCAGAAAAATTTGGTGGAGATTTGACAGTTAATAGC | |
| | TATGAGGAGTTAGAGAGTTTATTTAAAAATAAGGAATTGC | |
| | ATCCAATGGATTTAAAAAATGCTGTAGCTGAAGAACTTATA | |
| | AAGATTTTAGAGCCAATTAGAAAGAGATTATAA | |
| mutant ORS to | ATGGACGAATTTGAAATGATAAAGAGAAACACATCTGAAA | 313 |
| incorporate m-acyl | TTATCAGCGAGGAAGAGTTAAGAGAGGTTTTAAAAAAAGA | |
| phenylalanine into | TGAAAAATCTGCTTACATAGGTTTTGAACCAAGTGGTAAAA | |
| proteins (ketone 3-7) | TACATTTAGGGCATTATCTCCAAATAAAAAAGATGATTGAT | |
| | TTACAAAATGCTGGATTTGATATAATTATATTGTTGGCTGA | |
| | TTTACACGCCTATTTAAACCAGAAAGGAGAGTTGGATGAG | |
| | ATTAGAAAAATAGGAGATTATAACAAAAAAGTTTTTGAAG | |
| | CAATGGGGTTAAAGGCAAAATATGTTTATGGAAGTCTATTC | |
| | CAGCTTGATAAGGATTATACACTGAATGTCTATAGATTGGC | |
| | TTTAAAAACTACCTTAAAAAGAGCAAGAAGGAGTATGGAA | |
| | CTTATAGCAAGAGAGGATGAAAATCCAAAGGTTGCTGAAG | |
| | TTATCTATCCAATAATGCAGGTTAATGATATTCATTATACA | |
| | GGCGTTGATGTTGCAGTTGGAGGGATGGAGCAGAGAAAAA | |
| | TACACATGTTAGCAAGGGAGCTTTTACCAAAAAAGGTTGTT | |
| | TGTATTCACAACCCTGTCTTAACGGGTTTGGATGGAGAAGG | |
| | AAAGATGAGTTCTTCAAAAGGGAATTTTATAGCTGTTGATG | |
| | ACTCTCCAGAAGAGATTAGGGCTAAGATAAAGAAAGCATA | |
| | CTGCCCAGCTGGAGTTGTTGAAGGAAATCCAATAATGGAG | |
| | ATAGCTAAATACTTCCTTGAATATCCTTTAACCATAAAAAG | |
| | GCCAGAAAAATTTGGTGGAGATTTGACAGTTAATAGCTATG | |
| | AGGAGTTAGAGAGTTTATTTAAAAATAAGGAATTGCATCC | |
| | AATGGATTTAAAAAATGCTGTAGCTGAAGAACTTATAAAG | |
| | ATTTTAGAGCCAATTAGAAAGAGATTATAA | |
| mutant ORS to | ATGGACGAATTTGAAATGATAAAGAGAAACACATCTGAAA | 314 |
| incorporate m-acyl | TTATCAGCGAGGAAGAGTTAAGAGAGGTTTTAAAAAAAGA | |
| phenylalanine into | TGAAAAATCTGCTCTAATAGGTTTTGAACCAAGTGGTAAAA | |
| proteins (ketone 4-1) | TACATTTAGGGCATTATCTCCAAATAAAAAAGATGATTGAT | |
| | TTACAAAATGCTGGATTTGATATAATTATATTGTTGACAGA | |
| | TTTAAACGCCTATTTAAACCAGAAAGGAGAGTTGGATGAG | |
| | ATTAGAAAAATAGGAGATTATAACAAAAAAGTTTTTGAAG | |
| | CAATGGGGTTAAAGGCAAAATATGTTTATGGAAGTGAATT | |
| | CCAGCTTGATAAGGATTATACACTGAATGTCTATAGATTGG | |
| | CTTTAAAAACTACCTTAAAAAGAGCAAGAAGGAGTATGGA | |
| | ACTTATAGCAAGAGAGGATGAAAATCCAAAGGTTGCTGAA | |
| | GTTATCTATCCAATAATGCAGGTTAATGATATTCATTATTTA | |
| | GGCGTTGATGTTGCAGTTGGAGGGATGGAGCAGAGAAAAA | |
| | TACACATGTTAGCAAGGGAGCTTTTACCAAAAAAGGTTGTT | |
| | TGTATTCACAACCCTGTCTTAACGGGTTTGGATGGAGAAGG | |
| | AAAGATGAGTTCTTCAAAAGGGAATTTTATAGCTGTTGATG | |
| | ACTCTCCAGAAGAGATTAGGGCTAAGATAAAGAAAGCATA | |
| | CTGCCCAGCTGGAGTTGTTGAAGGAAATCCAATAATGGAG | |
| | ATAGCTAAATACTTCCTTGAATATCCTTTAACCATAAAAAG | |
| | GCCAGAAAAATTTGGTGGAGATTTGACAGTTAATAGCTATG | |
| | AGGAGTTAGAGAGTTTATTTAAAAATAAGGAATTGCATCC | |
| | AATGGATTTAAAAAATGCTGTAGCTGAAGAACTTATAAAG | |
| | ATTTTAGAGCCAATTAGAAAGAGATTATAA | |
| mutant ORS to | ATGGACGAATTTGAAATGATAAAGAGAAACACATCTGAAA | 315 |
| incorporate m-acyl | TTATCAGCGAGGAAGAGTTAAGAGAGGTTTTAAAAAAAGA | |
| phenylalanine into | TGAAAAATCTGCTCTAATAGGTTTTGAACCAAGTGGTAAAA | |
| proteins (ketone 5-4) | TACATTTAGGGCATTATCTCCAAATAAAAAAGATGATTGAT | |
| | TTACAAAATGCTGGATTTGATATAATTATATTGTTGACAGA | |
| | TTTAAAAGCCTATTTAAACCAGAAAGGAGAGTTGGATGAG | |
| | ATTAGAAAAATAGGAGATTATAACAAAAAAGTTTTTGAAG | |
| | CAATGGGGTTAAAGGCAAAATATGTTTATGGAAGTGAATT | |
| | CCAGCTTGATAAGGATTATACACTGAATGTCTATAGATTGG | |
| | CTTTAAAAACTACCTTAAAAAGAGCAAGAAGGAGTATGGA | |
| | ACTTATAGCAAGAGAGGATGAAAATCCAAAGGTTGCTGAA | |
| | GTTATCTATCCAATAATGTCAGTTAATGTAATTCATTATTTA | |
| | GGCGTTGATGTTGTAGTTGGAGGGATGGAGCAGAGAAAAA | |
| | TACACATGTTAGCAAGGGAGCTTTTACCAAAAAAGGTTGTT | |
| | TGTATTCACAACCCTGTCTTAACGGGTTTGGATGGAGAAGG | |
| | AAAGATGAGTTCTTCAAAAGGGAATTTTATAGCTGTTGATG | |
| | ACTCTCCAGAAGAGATTAGGGCTAAGATAAAGAAAGCATA | |
| | CTGCCCAGCTGGAGTTGTTGAAGGAAATCCAATAATGGAG | |
| | ATAGCTAAATACTTCCTTGAATATCCTTTAACCATAAAAAG | |
| | GCCAGAAAAATTTGGTGGAGATTTGACAGTTAATAGCTATG | |
| | AGGAGTTAGAGAGTTTATTTAAAAATAAGGAATTGCATCC | |
| | AATGGATTTAAAAAATGCTGTAGCTGAAGAACTTATAAAG | |
| | ATTTTAGAGCCAATTAGAAAGAGATTATAA | |
| mutant ORS to | ATGGACGAATTTGAAATGATAAAGAGAAACACATCTGAAA | 316 |
| incorporate m-acyl | TTATCAGCGAGGAAGAGTTAAGAGAGGTTTTAAAAAAAGA | |
| phenylalanine into | TGAAAAATCTGCTCTAATAGGTTTTGAACCAAGTGGTAAAA | |
| proteins (ketone 6-8) | TACATTTAGGGCATTATCTCCAAATAAAAAAGATGATTGAT | |
| | TTACAAAATGCTGGATTTGATATAATTATATTGTTGCCAGA | |
| | TTTATCAGCCTATTTAAACCAGAAAGGAGAGTTGGATGAG | |
| | ATTAGAAAAATAGGAGATTATAACAAAAAAGTTTTTGAAG | |
| | CAATGGGGTTAAAGGCAAAATATGTTTATGGAAGTGAATT | |
| | CCAGCTTGATAAGGATTATACACTGAATGTCTATAGATTGG | |
| | CTTTAAAAACTACCTTAAAAAGAGCAAGAAGGAGTATGGA | |
| | ACTTATAGCAAGAGAGGATGAAAATCCAAAGGTTGCTGAA | |
| | GTTATCTATCCAATAATGCAGGTTAATGATATTCATTATTTA | |
| | GGCGTTGATGTTGCAGTTGGAGGGATGGAGCAGAGAAAAA | |
| | TACACATGTTAGCAAGGGAGCTTTTACCAAAAAAGGTTGTT | |
| | TGTATTCACAACCCTGTCTTAACGGGTTTGGATGGAGAAGG | |
| | AAAGATGAGTTCTTCAAAAGGGAATTTTATAGCTGTTGATG | |
| | ACTCTCCAGAAGAGATTAGGGCTAAGATAAAGAAAGCATA | |
| | CTGCCCAGCTGGAGTTGTTGAAGGAAATCCAATAATGGAG | |
| | ATAGCTAAATACTTCCTTGAATATCCTTTAACCATAAAAAG | |
| | GCCAGAAAAATTTGGTGGAGATTTGACAGTTAATAGCTATG | |
| | AGGAGTTAGAGAGTTTATTTAAAAATAAGGAATTGCATCC | |
| | AATGGATTTAAAAAATGCTGTAGCTGAAGAACTTATAAAG | |
| | ATTTTAGAGCCAATTAGAAAGAGATTATAA | |
| mutant ORS to | ATGGACGAATTTGAAATGATAAAGAGAAACACATCTGAAA | 317 |
| incorporate m- | TTATCAGCGAGGAAGAGTTAAGAGAGGTTTTAAAAAAAGA | |
| methoxy | TGAAAAATCTGCTACAATAGGTTTTGAACCAAGTGGTAAA | |
| phenylalanine into | ATACATTTAGGGCATTATCTCCAAATAAAAAAGATGATTGA | |
| proteins (OMe 1-6) | TTTACAAAATGCTGGATTTGATATAATTATATTGTTGGCTG | |
| | ATTTACACGCCTATTTAAACCAGAAAGGAGAGTTGGATGA | |
| | GATTAGAAAAATAGGAGATTATAACAAAAAAGTTTTTGAA | |
| | GCAATGGGGTTAAAGGCAAAATATGTTTATGGAAGTGAAT | |
| | TCCAGCTTGATAAGGATTATACACTGAATGTCTATAGATTG | |
| | GCTTTAAAAACTACCTTAAAAAGAGCAAGAAGGAGTATGG | |
| | AACTTATAGCAAGAGAGGATGAAAATCCAAAGGTTGCTGA | |
| | AGTTATCTATCCAATAATGCAGGTTAATGATATTCATTATG | |
| | CAGGCGTTGATGTTGCAGTTGGAGGGATGGAGCAGAGAAA | |
| | AATACACATGTTAGCAAGGGAGCTTTTACCAAAAAAGGTT | |
| | GTTTGTATTCACAACCCTGTCTTAACGGGTTTGGATGGAGA | |
| | AGGAAAGATGAGTTCTTCAAAAGGGAATTTTATAGCTGTTG | |
| | ATGACTCTCCAGAAGAGATTAGGGCTAAGATAAAGAAAGC | |
| | ATACTGCCCAGCTGGAGTTGTTGAAGGAAATCCAATAATG | |
| | GAGATAGCTAAATACTTCCTTGAATATCCTTTAACCATAAA | |
| | AAGGCCAGAAAAATTTGGTGGAGATTTGACAGTTAATAGC | |
| | TATGAGGAGTTAGAGAGTTTATTTAAAAATAAGGAATTGC | |
| | ATCCAATGGATTTAAAAAATGCTGTAGCTGAAGAACTTATA | |
| | AAGATTTTAGAGCCAATTAGAAAGAGATTATAA | |
| mutant ORS to | ATGGACGAATTTGAAATGATAAAGAGAAACACATCTGAAA | 318 |
| incorporate m- | TTATCAGCGAGGAAGAGTTAAGAGAGGTTTTAAAAAAAGA | |
| methoxy | TGAAAAATCTGCTACAATAGGTTTTGAACCAAGTGGTAAA | |
| phenylalanine into | ATACATTTAGGGCATTATCTCCAAATAAAAAAGATGATTGA | |
| proteins (OMe 1-8) | TTTACAAAATGCTGGATTTGATATAATTATATTGTTGTCCG | |
| | ATTTACCAGCCTATTTAAACCAGAAAGGAGAGTTGGATGA | |
| | GATTAGAAAAATAGGAGATTATAACAAAAAAGTTTTTGAA | |
| | GCAATGGGGTTAAAGGCAAAATATGTTTATGGAAGTGAAT | |
| | TCCAGCTTGATAAGGATTATACACTGAATGTCTATAGATTG | |
| | GCTTTAAAAACTACCTTAAAAAGAGCAAGAAGGAGTATGG | |
| | AACTTATAGCAAGAGAGGATGAAAATCCAAAGGTTGCTGA | |
| | AGTTATCTATCCAATAATGCAGGTTAATGATATTCATTATTT | |
| | AGGCGTTGATGTTGCAGTTGGAGGGATGGAGCAGAGAAAA | |
| | ATACACATGTTAGCAAGGGAGCTTTTACCAAAAAAGGTTGT | |
| | TTGTATTCACAACCCTGTCTTAACGGGTTTGGATGGAGAAG | |
| | GAAAGATGAGTTCTTCAAAAGGGAATTTTATAGCTGTTGAT | |
| | GACTCTCCAGAAGAGATTAGGGCTAAGATAAAGAAAGCAT | |
| | ACTGCCCAGCTGGAGTTGTTGAAGGAAATCCAATAATGGA | |
| | GATAGCTAAATACTTCCTTGAATATCCTTTAACCATAAAAA | |
| | GGCCAGAAAAATTTGGTGGAGATTTGACAGTTAATAGCTAT | |
| | GAGGAGTTAGAGAGTTTATTTAAAAATAAGGAATTGCATC | |
| | CAATGGATTTAAAAAATGCTGTAGCTGAAGAACTTATAAA | |
| | GATTTTAGAGCCAATTAGAAAGAGATTATAA | |
| mutant ORS to | ATGGACGAATTTGAAATGATAAAGAGAAACACATCTGAAA | 319 |
| incorporate m- | TTATCAGCGAGGAAGAGTTAAGAGAGGTTTTAAAAAAAGA | |
| methoxy | TGAAAAATCTGCTACAATAGGTTTTGAACCAAGTGGTAAA | |
| phenylalanine into | ATACATTTAGGGCATTATCTCCAAATAAAAAAGATGATTGA | |
| proteins (OMe 2-7) | TTTACAAAATGCTGGATTTGATATAATTATATTGTTGGCTG | |
| | ATTTACACGCCTATTTAAACCAGAAAGGAGAGTTGGATGA | |
| | GATTAGAAAAATAGGAGATTATAACAAAAAAGTTTTTGAA | |
| | GCAATGGGGTTAAAGGCAAAATATGTTTATGGAAGTATGTT | |
| | CCAGCTTGATAAGGATTATACACTGAATGTCTATAGATTGG | |
| | CTTTAAAAACTACCTTAAAAAGAGCAAGAAGGAGTATGGA | |
| | ACTTATAGCAAGAGAGGATGAAAATCCAAAGGTTGCTGAA | |
| | GTTATCTATCCAATAATGCAGGTTAATTCATCACATTATGA | |
| | CGGCGTTGATGTTGCAGTTGGAGGGATGGAGCAGAGAAAA | |
| | ATACACATGTTAGCAAGGGAGCTTTTACCAAAAAAGGTTGT | |
| | TTGTATTCACAACCCTGTCTTAACGGGTTTGGATGGAGAAG | |
| | GAAAGATGAGTTCTTCAAAAGGGAATTTTATAGCTGTTGAT | |
| | GACTCTCCAGAAGAGATTAGGGCTAAGATAAAGAAAGCAT | |
| | ACTGCCCAGCTGGAGTTGTTGAAGGAAATCCAATAATGGA | |
| | GATAGCTAAATACTTCCTTGAATATCCTTTAACCATAAAAA | |
| | GGCCAGAAAAATTTGGTGGAGATTTGACAGTTAATAGCTAT | |
| | GAGGAGTTAGAGAGTTTATTTAAAAATAAGGAATTGCATC | |
| | CAATGGATTTAAAAAATGCTGTAGCTGAAGAACTTATAAA | |
| | GATTTTAGAGCCAATTAGAAAGAGATTATAA | |
| mutant ORS to | ATGGACGAATTTGAAATGATAAAGAGAAACACATCTGAAA | 320 |
| incorporate m- | TTATCAGCGAGGAAGAGTTAAGAGAGGTTTTAAAAAAAGA | |
| methoxy | TGAAAAATCTGCTCAAATAGGTTTTGAACCAAGTGGTAAA | |
| phenylalanine into | ATACATTTAGGGCATTATCTCCAAATAAAAAAGATGATTGA | |
| proteins (OMe 4-1) | TTTACAAAATGCTGGATTTGATATAATTATATTGTTGCCAG | |
| | ATTTACACGCCTATTTAAACCAGAAAGGAGAGTTGGATGA | |
| | GATTAGAAAAATAGGAGATTATAACAAAAAAGTTTTTGAA | |
| | GCAATGGGGTTAAAGGCAAAATATGTTTATGGAAGTGAAT | |
| | TCCAGCTTGATAAGGATTATACACTGAATGTCTATAGATTG | |
| | GCTTTAAAAACTACCTTAAAAAGAGCAAGAAGGAGTATGG | |
| | AACTTATAGCAAGAGAGGATGAAAATCCAAAGGTTGCTGA | |
| | AGTTATCTATCCAATAATGCAGGTTAATGATATTCATTATTT | |
| | AGGCGTTGATGTTGACGTTGGAGGGATGGAGCAGAGAAAA | |
| | ATACACATGTTAGCAAGGGAGCTTTTACCAAAAAAGGTTGT | |
| | TTGTATTCACAACCCTGTCTTAACGGGTTTGGATGGAGAAG | |
| | GAAAGATGAGTTCTTCAAAAGGGAATTTTATAGCTGTTGAT | |
| | GACTCTCCAGAAGAGATTAGGGCTAAGATAAAGAAAGCAT | |
| | ACTGCCCAGCTGGAGTTGTTGAAGGAAATCCAATAATGGA | |
| | GATAGCTAAATACTTCCTTGAATATCCTTTAACCATAAAAA | |
| | GGCCAGAAAAATTTGGTGGAGATTTGACAGTTAATAGCTAT | |
| | GAGGAGTTAGAGAGTTTATTTAAAAATAAGGAATTGCATC | |
| | CAATGGATTTAAAAAATGCTGTAGCTGAAGAACTTATAAA | |
| | GATTTTAGAGCCAATTAGAAAGAGATTATAA | |
| mutant ORS to | ATGGACGAATTTGAAATGATAAAGAGAAACACATCTGAAA | 321 |
| incorporate m- | TTATCAGCGAGGAAGAGTTAAGAGAGGTTTTAAAAAAAGA | |
| methoxy | TGAAAAATCTGCTCACATAGGTTTTGAACCAAGTGGTAAAA | |
| phenylalanine into | TACATTTAGGGCATTATCTCCAAATAAAAAAGATGATTGAT | |
| proteins (OMe 4-8) | TTACAAAATGCTGGATTTGATATAATTATATTGTTGGCTGA | |
| | TTTACACGCCTATTTAAACCAGAAAGGAGAGTTGGATGAG | |
| | ATTAGAAAAATAGGAGATTATAACAAAAAAGTTTTTGAAG | |
| | CAATGGGGTTAAAGGCAAAATATGTTTATGGAAGTGCATTC | |
| | CAGCTTGATAAGGATTATACACTGAATGTCTATAGATTGGC | |
| | TTTAAAAACTACCTTAAAAAGAGCAAGAAGGAGTATGGAA | |
| | CTTATAGCAAGAGAGGATGAAAATCCAAAGGTTGCTGAAG | |
| | TTATCTATCCAATAATGCAGGTTAATGGACACCATTATATA | |
| | GGCGTTGATGTTGCAGTTGGAGGGATGGAGCAGAGAAAAA | |
| | TACACATGTTAGCAAGGGAGCTTTTACCAAAAAAGGTTGTT | |
| | TGTATTCACAACCCTGTCTTAACGGGTTTGGATGGAGAAGG | |
| | AAAGATGAGTTCTTCAAAAGGGAATTTTATAGCTGTTGATG | |
| | ACTCTCCAGAAGAGATTAGGGCTAAGATAAAGAAAGCATA | |
| | CTGCCCAGCTGGAGTTGTTGAAGGAAATCCAATAATGGAG | |
| | ATAGCTAAATACTTCCTTGAATATCCTTTAACCATAAAAAG | |
| | GCCAGAAAAATTTGGTGGAGATTTGACAGTTAATAGCTATG | |
| | AGGAGTTAGAGAGTTTATTTAAAAATAAGGAATTGCATCC | |
| | AATGGATTTAAAAAATGCTGTAGCTGAAGAACTTATAAAG | |
| | ATTTTAGAGCCAATTAGAAAGAGATTATAA | |
| mutant ORS to | ATGGACGAATTTGAAATGATAAAGAGAAACACATCTGAAA | 322 |
| incorporate p-O- | TTATCAGCGAGGAAGAGTTAAGAGAGGTTTTAAAAAAAGA | |
| allyl tyrosine into | TGAAAAATCTGCTTACATAGGTTTTGAACCAAGTGGTAAAA | |
| proteins | TACATTTAGGGCATTATCTCCAAATAAAAAAGATGATTGAT | |
| | TTACAAAATGCTGGATTTGATATAATTATATTGTTGGCTGA | |
| | TTTACACGCCTATTTAAACCAGAAAGGAGAGTTGGATGAG | |
| | ATTAGAAAAATAGGAGATTATAACAAAAAAGTTTTTGAAG | |
| | CAATGGGGTTAAAGGCAAAATATGTTTATGGAAGTGCATTC | |
| | CAGCTTGATAAGGATTATACACTGAATGTCTATAGATTGGC | |
| | TTTAAAAACTACCTTAAAAAGAGCAAGAAGGAGTATGGAA | |
| | CTTATAGCAAGAGAGGATGAAAATCCAAAGGTTGCTGAAG | |
| | TTATCTATCCAATAATGCAGGTTAATTGCGCACATTATTTA | |
| | GGCGTTGATGTTGCAGTTGGAGGGATGGAGCAGAGAAAAA | |
| | TACACATGTTAGCAAGGGAGCTTTTACCAAAAAAGGTTGTT | |
| | TGTATTCACAACCCTGTCTTAACGGGTTTGGATGGAGAAGG | |
| | AAAGATGAGTTCTTCAAAAGGGAATTTTATAGCTGTTGATG | |
| | ACTCTCCAGAAGAGATTAGGGCTAAGATAAAGAAAGCATA | |
| | CTGCCCAGCTGGAGTTGTTGAAGGAAATCCAATAATGGAG | |
| | ATAGCTAAATACTTCCTTGAATATCCTTTAACCATAAAAAG | |
| | GCCAGAAAAATTTGGTGGAGATTTGACAGTTAATAGCTATG | |
| | AGGAGTTAGAGAGTTTATTTAAAAATAAGGAATTGCATCC | |
| | AATGGATTTAAAAAATGCTGTAGCTGAAGAACTTATAAAG | |
| | ATTTTAGAGCCAATTAGAAAGAGATTATAA | |
| ORS for the | ATGGACGAATTTGAAATGATAAAGAGAAACACATCTGAAA | 323 |
| incorporation of p- | TTATCAGCGAGGAAGAGTTAAGAGAGGTTTTAAAAAAAGA | |
| benzoyl-L- | TGAAAAATCTGCTGGTATAGGTTTTGAACCAAGTGGTAAAA | |
| phenylalanine (p- | TACATTTAGGGCATTATCTCCAAATAAAAAAGATGATTGAT | |
| BpaRS(H6)) | TTACAAAATGCTGGATTTGATATAATTATATTGTTGGCTGA | |
| | TTTACACGCCTATTTAAACCAGAAAGGAGAGTTGGATGAG | |
| | ATTAGAAAAATAGGAGATTATAACAAAAAAGTTTTTGAAG | |
| | CAATGGGGTTAAAGGCAAAATATGTTTATGGAAGTTCCTTC | |
| | CAGCTTGATAAGGATTATACACTGAATGTCTATAGATTGGC | |
| | TTTAAAAACTACCTTAAAAAGAGCAAGAAGGAGTATGGAA | |
| | CTTATAGAAGAGAGGATGAAAATCCAAAGGTTGCTGAAGT | |
| | TATCTATCCAATAATGCAGGTTAATACGAGTCATTATCTGG | |
| | GCGTTGATGTTGCAGTTGGAGGGATGGAGCAGAGAAAAAT | |
| | ACACATGTTAGCAAGGGAGCTTTTACCAAAAAAGGTTGTTT | |
| | GTATTCACAACCCTGTCTTAACGGGTTTGGATGGAGAAGGA | |
| | AAGATGAGTTCTTCAAAAGGGAATTTTATAGCTGTTGATGA | |
| | CTCTCCAGAAGAGATTAGGGCTAAGATAAAGAAAGCATAC | |
| | TGCCCAGCTGGAGTTGTTGAAGGAAATCCAATAATGGAGA | |
| | TAGCTAAATACTTCCTTGAATATCCTTTAACCATAAAAAGG | |
| | CCAGAAAAATTTGGTGGAGATTTGACAGTTAATAGCTATGA | |
| | GGAGTTAGAGAGTTTATTTAAAAATAAGGAATTGCATCCA | |
| | ATGGATTTAAAAAATGCTGTAGCTGAAGAACTTATAAAGA | |
| | TTTTAGAGCCAATTAGAAAGAGATTA | |
| ORS for the | ATGGACGAATTTGAAATGATAAAGAGAAACACATCTGAAA | 324 |
| incorporation of p- | TTATCAGCGAGGAAGAGTTAAGAGAGGTTTTAAAAAAAGA | |
| azido- | TGAAAAATCTGCTACGATAGGTTTTGAACCAAGTGGTAAA | |
| phenylalanine (p- | ATACATTTAGGGCATTATCTCCAAATAAAAAAGATGATTGA | |
| Az-PheRS(3)) | TTTACAAAATGCTGGATTTGATATAATTATATTGTTGGCTG | |
| | ATTTACACGCCTATTTAAACCAGAAAGGAGAGTTGGATGA | |
| | GATTAGAAAAATAGGAGATTATAACAAAAAAGTTTTTGAA | |
| | GCAATGGGGTTAAAGGCAAAATATGTTTATGGAAGTAATTT | |
| | CCAGCTTGATAAGGATTATACACTGAATGTCTATAGATTGG | |
| | CTTTAAAAACTACCTTAAAAAGAGCAAGAAGGAGTATGGA | |
| | ACTTATAGAAGAGAGGATGAAAATCCAAAGGTTGCTGAAG | |
| | TTATCTATCCAATAATGCAGGTTAATCCGCTTCATTATCAG | |
| | GGCGTTGATGTTGCAGTTGGAGGGATGGAGCAGAGAAAAA | |
| | TACACATGTTAGCAAGGGAGCTTTTACCAAAAAAGGTTGTT | |
| | TGTATTCACAACCCTGTCTTAACGGGTTTGGATGGAGAAGG | |
| | AAAGATGAGTTCTTCAAAAGGGAATTTTATAGCTGTTGATG | |
| | ACTCTCCAGAAGAGATTAGGGCTAAGATAAAGAAAGCATA | |
| | CTGCCCAGCTGGAGTTGTTGAAGGAAATCCAATAATGGAG | |
| | ATAGCTAAATACTTCCTTGAATATCCTTTAACCATAAAAAG | |
| | GCCAGAAAAATTTGGTGGAGATTTGACAGTTAATAGCTATG | |
| | AGGAGTTAGAGAGTTTATTTAAAAATAAGGAATTGCATCC | |
| | AATGGATTTAAAAAATGCTGTAGCTGAAGAACTTATAAAG | |
| | ATTTTAGAGCCAATTAGAAAGAGATTA | |
| ORS for the | ATGGACGAATTTGAAATGATAAAGAGAAACACATCTGAAA | 325 |
| incorporation of p- | TTATCAGCGAGGAAGAGTTAAGAGAGGTTTTAAAAAAAGA | |
| azido- | TGAAAAATCTGCTACGATAGGTTTTGAACCAAGTGGTAAA | |
| phenylalanine (p- | ATACATTTAGGGCATTATCTCCAAATAAAAAAGATGATTGA | |
| Az-PheRS(6)) | TTTACAAAATGCTGGATTTGATATAATTATATTGTTGGCTG | |
| | ATTTACACGCCTATTTAAACCAGAAAGGAGAGTTGGATGA | |
| | GATTAGAAAAATAGGAGATTATAACAAAAAAGTTTTTGAA | |
| | GCAATGGGGTTAAAGGCAAAATATGTTTATGGAAGTCTGTT | |
| | CCAGCTTGATAAGGATTATACACTGAATGTCTATAGATTGG | |
| | CTTTAAAAACTACCTTAAAAAGAGCAAGAAGGAGTATGGA | |
| | ACTTATAGAAGAGAGGATGAAAATCCAAAGGTTGCTGAAG | |
| | TTATCTATCCAATAATGCAGGTTAATCCTCTTCATTATGAG | |
| | GGCGTTGATGTTGCAGTTGGAGGGATGGAGCAGAGAAAAA | |
| | TACACATGTTAGCAAGGGAGCTTTTACCAAAAAAGGTTGTT | |
| | TGTATTCACAACCCTGTCTTAACGGGTTTGGATGGAGAAGG | |
| | AAAGATGAGTTCTTCAAAAGGGAATTTTATAGCTGTTGATG | |
| | ACTCTCCAGAAGAGATTAGGGCTAAGATAAAGAAAGCATA | |
| | CTGCCCAGCTGGAGTTGTTGAAGGAAATCCAATAATGGAG | |
| | ATAGCTAAATACTTCCTTGAATATCCTTTAACCATAAAAAG | |
| | GCCAGAAAAATTTGGTGGAGATTTGACAGTTAATAGCTATG | |
| | AGGAGTTAGAGAGTTTATTTAAAAATAAGGAATTGCATCC | |
| | AATGGATTTAAAAAATGCTGTAGCTGAAGAACTTATAAAG | |
| | ATTTTAGAGCCAATTAGAAAGAGATTA | |
| ORS for the | ATGGACGAATTTGAAATGATAAAGAGAAACACATCTGAAA | 326 |
| incorporation of p- | TTATCAGCGAGGAAGAGTTAAGAGAGGTTTTAAAAAAAGA | |
| azido- | TGAAAAATCTGCTCTTATAGGTTTTGAACCAAGTGGTAAAA | |
| phenylalanine (p- | TACATTTAGGGCATTATCTCCAAATAAAAAAGATGATTGAT | |
| Az-PheRS(20)) | TTACAAAATGCTGGATTTGATATAATTATATTGTTGGCTGA | |
| | TTTACACGCCTATTTAAACCAGAAAGGAGAGTTGGATGAG | |
| | ATTAGAAAAATAGGAGATTATAACAAAAAAGTTTTTGAAG | |
| | CAATGGGGTTAAAGGCAAAATATGTTTATGGAAGTACTTTC | |
| | CAGCTTGATAAGGATTATACACTGAATGTCTATAGATTGGC | |
| | TTTAAAAACTACCTTAAAAAGAGCAAGAAGGAGTATGGAA | |
| | CTTATAGAAGAGAGGATGAAAATCCAAAGGTTGCTGAAGT | |
| | TATCTATCCAATAATGCAGGTTAATCCGGTTCATTATCAGG | |
| | GCGTTGATGTTGCAGTTGGAGGGATGGAGCAGAGAAAAAT | |
| | ACACATGTTAGCAAGGGAGCTTTTACCAAAAAAGGTTGTTT | |
| | GTATTCACAACCCTGTCTTAACGGGTTTGGATGGAGAAGGA | |
| | AAGATGAGTTCTTCAAAAGGGAATTTTATAGCTGTTGATGA | |
| | CTCTCCAGAAGAGATTAGGGCTAAGATAAAGAAAGCATAC | |
| | TGCCCAGCTGGAGTTGTTGAAGGAAATCCAATAATGGAGA | |
| | TAGCTAAATACTTCCTTGAATATCCTTTAACCATAAAAAGG | |
| | CCAGAAAAATTTGGTGGAGATTTGACAGTTAATAGCTATGA | |
| | GGAGTTAGAGAGTTTATTTAAAAATAAGGAATTGCATCCA | |
| | ATGGATTTAAAAAATGCTGTAGCTGAAGAACTTATAAAGA | |
| | TTTTAGAGCCAATTAGAAAGAGATTA | |
| ORS for the | ATGGACGAATTTGAAATGATAAAGAGAAACACATCTGAAA | 327 |
| incorporation of p- | TTATCAGCGAGGAAGAGTTAAGAGAGGTTTTAAAAAAAGA | |
| azido- | TGAAAAATCTGCTACTATAGGTTTTGAACCAAGTGGTAAAA | |
| phenylalanine (p- | TACATTTAGGGCATTATCTCCAAATAAAAAAGATGATTGAT | |
| Az-PheRS(24)) | TTACAAAATGCTGGATTTGATATAATTATATTGTTGGCTGA | |
| | TTTACACGCCTATTTAAACCAGAAAGGAGAGTTGGATGAG | |
| | ATTAGAAAAATAGGAGATTATAACAAAAAAGTTTTTGAAG | |
| | CAATGGGGTTAAAGGCAAAATATGTTTATGGAAGTTCGTTC | |
| | CAGCTTGATAAGGATTATACACTGAATGTCTATAGATTGGC | |
| | TTTAAAAACTACCTTAAAAAGAGCAAGAAGGAGTATGGAA | |
| | CTTATAGAAGAGAGGATGAAAATCCAAAGGTTGCTGAAGT | |
| | TATCTATCCAATAATGCAGGTTAATCCACTGCATTATCAGG | |
| | GCGTTGATGTTGCAGTTGGAGGGATGGAGCAGAGAAAAAT | |
| | ACACATGTTAGCAAGGGAGCTTTTACCAAAAAAGGTTGTTT | |
| | GTATTCACAACCCTGTCTTAACGGGTTTGGATGGAGAAGGA | |
| | AAGATGAGTTCTTCAAAAGGGAATTTTATAGCTGTTGATGA | |
| | CTCTCCAGAAGAGATTAGGGCTAAGATAAAGAAAGCATAC | |
| | TGCCCAGCTGGAGTTGTTGAAGGAAATCCAATAATGGAGA | |
| | TAGCTAAATACTTCCTTGAATATCCTTTAACCATAAAAAGG | |
| | CCAGAAAAATTTGGTGGAGATTTGACAGTTAATAGCTATGA | |
| | GGAGTTAGAGAGTTTATTTAAAAATAAGGAATTGCATCCA | |
| | ATGGATTTAAAAAATGCTGTAGCTGAAGAACTTATAAAGA | |
| | TTTTAGAGCCAATTAGAAAGAGATTA | |
| Archaeoglobus | ATGAGCGATTTCAGGATAATTGAGGAGAAGTGGCAGAAGG | 328 |
| fulgidus leucyl | CGTGGGAGAAGGACAGAATTTTTGAGTCCGATCCTAATGA | |
| tRNA-synthetase | GAAGGAGAAGTTTTTTCTCACAATTCCCTATCCTTACCTTA | |
| (AFLRS) | ATGGAAATCTTCACGCAGGTCACACGAGAACCTTCACAATT | |
| | GGCGATGCCTTCGCCAGATACATGAGAATGAAGGGCTACA | |
| | ACGTTCTCTTTCCCCTCGGCTTTCATGTTACGGGCACCCCAA | |
| | TCATTGGCCTTGCGGAGCTCATAGCCAAGAGGGACGAGAG | |
| | GACGATAGAGGTTTACACCAAATACCATGACGTTCCGCTGG | |
| | AGGACTTGCTTCAGCTCACAACTCCAGAGAAAATCGTTGAG | |
| | TACTTCTCAAGGGAGGCGCTGCAGGCTTTGAAGAGCATAG | |
| | GCTACTCCATTGACTGGAGGAGGGTTTTCACCACAACCGAT | |
| | GAAGAGTATCAGAGATTCATCGAGTGGCAGTACTGGAAGC | |
| | TCAAGGAGCTTGGCCTGATTGTGAAGGGCACCCACCCCGTC | |
| | AGATACTGCCCCCACGACCAGAATCCTGTTGAAGACCACG | |
| | ACCTTCTCGCTGGGGAGGAGGCAACTATTGTTGAATTTACC | |
| | GTTATAAAGTTCAGGCTTGAAGATGGAGACCTCATTTTCCC | |
| | CTGTGCAACTCTCCGTCCCGAAACCGTGTTTGGCGTCACGA | |
| | ACATCTGGGTAAAGCCGACAACCTACGTAATTGCCGAGGT | |
| | GGATGGGGAAAAGTGGTTTGTGAGCAAAGAGGCTTACGAG | |
| | AAGCTCACCTACACGGAGAAAAAAGTCAGGCTGCTGGAGG | |
| | AGGTTGATGCGTCGCAGTTCTTCGGCAAGTACGTCATAGTC | |
| | CCGCTGGTAAACAGAAAAGTGCCAATTCTGCCTGCAGAGTT | |
| | TGTTGACACCGACAACGCAACAGGAGTTGTGATGAGCGTT | |
| | CCCGCACACGCTCCTTTTGACCTGGCTGCCATTGAGGACTT | |
| | GAAGAGAGACGAGGAAACGCTGGCGAAGTACGGA'ATTGA | |
| | CAAAAGCGTTGTAGAGAGCATAAAGCCAATAGTTCTGATT | |
| | AAGACGGACATTGAAGGTGTTCCTGCTGAGAAGCTAATAA | |
| | GAGAGCTTGGAGTGAAGAGCCAGAAGGACAAGGAGCTGCT | |
| | GGATAAGGCAACCAAGACCCTCTACAAGAAGGAGTACCAC | |
| | ACGGGAATCATGCTGGACAACACGATGAACTATGCTGGAA | |
| | TGAAAGTTTCTGAGGCGAAGGAGAGAGTTCATGAGGATTT | |
| | GGTTAAGCTTGGCTTGGGGGATGTTTTCTACGAGTTCAGCG | |
| | AGAAGCCCGTAATCTGCAGGTGCGGAACGAAGTGCGTTGT | |
| | TAAGGTTGTTAGGGACCAGTGGTTCCTGAACTACTCCAACA | |
| | GAGAGTGGAAGGAGAAGGTTCTGAATCACCTTGAAAAGAT | |
| | GCGAATCATCCCCGACTACTACAAGGAGGAGTTCAGGAAC | |
| | AAGATTGAGTGGCTCAGGGACAAGGCTTGTGCCAGAAGGA | |
| | AGGGGCTTGGAACGAGAATTCCGTGGGATAAGGAGTGGCT | |
| | CATCGAGAGCCTTTCAGACTCAACAATCTACATGGCCTACT | |
| | ACATCCTTGCCAAGTACATCAACGCAGGATTGCTCAAGGCC | |
| | GAGAACATGACTCCCGAGTTCCTCGACTACGTGCTGCTGGG | |
| | CAAAGGTGAGGTTGGGAAAGTTGCGGAAGCTTCAAAACTC | |
| | AGCGTGGAGTTAATCCAGCAGATCAGGGACGACTTCGAGT | |
| | ACTGGTATCCCGTTGACCTAAGAAGCAGTGGCAAGGACTT | |
| | GGTTGCAAACCACCTGCTCTTCTACCTCTTCCACCACGTCG | |
| | CCATTTTCCCGCCAGATAAGTGGCCGAGGGCAATTGCCGTA | |
| | AACGGATACGTCAGCCTTGAGGGCAAGAAGATGAGCAAGA | |
| | GCAAAGGGCCCTTGCTAACGATGAAGAGGGCGGTGCAGCA | |
| | GTATGGTGCGGATGTGACGAGGCTCTACATCCTCCACGCTG | |
| | CAGAGTACGACAGCGATGCGGACTGGAAGAGCAGAGAGGT | |
| | TGAAGGGCTTGCAAACCACCTCAGGAGGTTCTACAACCTCG | |
| | TGAAGGAGAACTACCTGAAAGAGGTGGGAGAGCTAACAAC | |
| | CCTCGACCGCTGGCTTGTGAGCAGGATGCAGAGGGCAATA | |
| | AAGGAAGTGAGGGAGGCTATGGACAACCTGCAGACGAGG | |
| | AGGGCCGTGAATGCCGCCTTCTTCGAGCTCATGAACGACGT | |
| | GAGATGGTATCTGAGGAGAGGAGGTGAGAACCTCGCTATA | |
| | ATACTGGACGACTGGATCAAGCTCCTCGCCCCCTTTGCTCC | |
| | GCACATTTGCGAGGAGCTGTGGCACTTGAAGCATGACAGC | |
| | TACGTCAGCCTCGAAAGCTACCCAGAATACGACGAAACCA | |
| | GGGTTGACGAGGAGGCGGAGAGAATTGAGGAATACCTCCG | |
| | AAACCTTGTTGAGGACATTCAGGAAATCAAGAAGTTTGTTA | |
| | GCGATGCGAAGGAGGTTTACATTGCTCCCGCCGAAGACTG | |
| | GAAGGTTAAGGCAGCAAAGGTCGTTGCTGAAAGCGGGGAT | |
| | GTTGGGGAGGCGATGAAGCAGCTTATGCAGGACGAGGAGC | |
| | TTAGGAAGCTCGGCAAAGAAGTGTCAAATTTCGTCAAGAA | |
| | GATTTTCAAAGACAGAAAGAAGCTGATGCTAGTTAAGGAG | |
| | TGGGAAGTTCTGCAGCAGAACCTGAAATTTATTGAGAATG | |
| | AGACCGGACTGAAGGTTATTCTTGATACTCAGAGAGTTCCT | |
| | GAGGAGAAGAGGAGGCAGGCAGTTCCGGGCAAGCCCGCG | |
| | ATTTATGTTGCTTAA | |
| Methanobacterium | GTGGATATTGAAAGAAAATGGCGTGATAGATGGAGAGATG | 329 |
| thermoautotrophicum | CTGGCATATTTCAGGCTGACCCTGATGACAGAGAAAAGAT | |
| leucyl tRNA- | ATTCCTCACAGTCGCTTACCCCTACCCCAGTGGTGCGATGC | |
| synthetase | ACATAGGACACGGGAGGACCTACACTGTCCCTGATGTCTAT | |
| (MtLRS) | GCACGGTTCAAGAGGATGCAGGGCTACAACGTCCTGTTTCC | |
| | CATGGCCTGGCATGTCACAGGGGCCCCTGTCATAGGGATA | |
| | GCGCGGAGGATTCAGAGGAAGGATCCCTGGACCCTCAAAA | |
| | TCTACAGGGAGGTCCACAGGGTCCCCGAGGATGAGCTTGA | |
| | ACGTTTCAGTGACCCTGAGTACATAGTTGAATACTTCAGCA | |
| | GGGAATACCGGTCTGTTATGGAGGATATGGGCTACTCCATC | |
| | GACTGGAGGCGTGAATTCAAAACCACGGATCCCACCTACA | |
| | GCAGGTTCATACAGTGGCAGATAAGGAAGCTGAGGGACCT | |
| | TGGCCTCGTAAGGAAGGGCGCCCATCCTGTTAAGTACTGCC | |
| | CTGAATGTGAAAACCCTGTGGGTGACCATGACCTCCTTGAG | |
| | GGTGAGGGGGTTGCCATAAACCAGCTCACACTCCTCAAATT | |
| | CAAACTTGGAGACTCATACCTGGTCGCAGCCACCTTCAGGC | |
| | CCGAGACAATCTATGGGGCCACCAACCTCTGGCTGAACCCT | |
| | GATGAGGATTATGTGAGGGTTGAAACAGGTGGTGAGGAGT | |
| | GGATAATAAGCAGGGCTGCCGTGGATAATCTTTCACACCA | |
| | GAAACTGGACCTCAAGGTTTCCGGTGACGTCAACCCCGGG | |
| | GACCTGATAGGGATGTGCGTGGAGAATCCTGTGACGGGCC | |
| | AGGAACACCCCATACTCCCGGCTTCCTTCGTTGACCCTGAA | |
| | TATGCCACAGGTGTTGTGTTCTCTGTCCCTGCACATGCCCCT | |
| | GCAGACTTCATAGCCCTTGAGGACCTCAGGACAGACCATG | |
| | AACTCCTTGAAAGGTACGGTCTTGAGGATGTGGTTGCTGAT | |
| | ATTGAGCCCGTGAATGTCATAGCAGTGGATGGCTACGGTG | |
| | AGTTCCCGGCGGCCGAGGTTATAGAGAAATTTGGTGTCAG | |
| | AAACCAGGAGGACCCCCGCCTTGAGGATGCCACCGGGGAG | |
| | CTATACAAGATCGAGCATGCGAGGGGTGTTATGAGCAGCC | |
| | ACATCCCTGTCTATGGTGGTATGAAGGTCTCTGAGGCCCGT | |
| | GAGGTCATCGCTGATGAACTGAAGGACCAGGGCCTTGCAG | |
| | ATGAGATGTATGAATTCGCTGAGCGACCTGTTATATGCCGC | |
| | TGCGGTGGCAGGTGCGTTGTGAGGGTCATGGAGGACCAGT | |
| | GGTTCATGAAGTACTCTGATGACGCCTGGAAGGACCTCGCC | |
| | CACAGGTGCCTCGATGGCATGAAGATAATACCCGAGGAGG | |
| | TCCGGGCCAACTTTGAATACTACATCGACTGGCTCAATGAC | |
| | TGGGCATGTTCAAGGAGGATAGGCCTTGGAACAAGGCTGC | |
| | CCTGGGATGAGAGGTGGATCATCGAACCCCTCACAGACTC | |
| | AACAATCTACATGGCATATTACACCATCGCACACCGCCTCA | |
| | GGGAGATGGATGCCGGGGAGATGGACGATGAGTTCTTTGA | |
| | TGCCATATTCCTAGATGATTCAGGAACCTTTGAGGATCTCA | |
| | GGGAGGAATTCCGGTACTGGTACCCCCTTGACTGGAGGCTC | |
| | TCTGCAAAGGACCTCATAGGCAATCACCTGACATTCCATAT | |
| | ATTCCACCACTCAGCCATATTCCCTGAGTCAGGGTGGCCCC | |
| | GGGGGGCTGTGGTCTTTGGTATGGGCCTTCTTGAGGGCAAC | |
| | AAGATGTCATCCTCCAAGGGCAACGTCATACTCCTGAGGG | |
| | ATGCCATCGAGAAGCACGGTGCAGACGTGGTGCGGCTCTT | |
| | CCTCATGTCCTCAGCAGAGCCATGGCAGGACTTTGACTGGA | |
| | GGGAGAGTGAGGTCATCGGGACCCGCAGGAGGATTGAATG | |
| | GTTCAGGGAATTCGGAGAGAGGGTCTCAGGTATCCTGGAT | |
| | GGTAGGCCAGTCCTCAGTGAGGTTACTCCAGCTGAACCTGA | |
| | AAGCTTCATTGGAAGGTGGATGATGGGTCAGCTGAACCAG | |
| | AGGATACGTGAAGCCACAAGGGCCCTTGAATCATTCCAGA | |
| | CAAGAAAGGCAGTTCAGGAGGCACTCTATCTCCTTAAAAA | |
| | GGATGTTGACCACTACCTTAAGCGTGTTGAGGGTAGAGTTG | |
| | ATGATGAGGTTAAATCTGTCCTTGCAAACGTTCTGCACGCC | |
| | TGGATAAGGCTCATGGCTCCATTCATACCCTACACTGCTGA | |
| | GGAGATGTGGGAGAGGTATGGTGGTGAGGGTTTTGTAGCA | |
| | GAAGCTCCATGGCCTGACTTCTCAGATGATGCAGAGAGCA | |
| | GGGATGTGCAGGTTGCAGAGGAGATGGTCCAGAATACCGT | |
| | TAGAGACATTCAGGAAATCATGAAGATCCTTGGATCCACCC | |
| | CGGAGAGGGTCCACATATACACCTCACCAAAATGGAAATG | |
| | GGATGTGCTAAGGGTCGCAGCAGAGGTAGGAAAACTAGAT | |
| | ATGGGCTCCATAATGGGAAGGGTTTCAGCTGAGGGCATCC | |
| | ATGATAACATGAAGGAGGTTGCTGAATTTGTAAGGAGGAT | |
| | CATCAGGGACCTTGGTAAATCAGAGGTTACGGTGATAGAC | |
| | GAGTACAGCGTACTCATGGATGCATCTGATTACATTGAATC | |
| | AGAGGTTGGAGCCAGGGTTGTGATACACAGCAAACCAGAC | |
| | TATGACCCTGAAAACAAGGCTGTGAATGCCGTTCCCCTGAA | |
| | GCCAGCCATATACCTTGAATGA | |
| mutant TyrRS | MDEFEMIKRNTSEIISEEELREVLKKDEKSAQIGFEPSGKIHLG | 330 |
| (LWJ16) | HYLQIKKMIDLQNAGFDIIILLADLHAYLNQKGELDEIRKIGDY | |
| | NKKVFEAMGLKAKYVYGSTFQLDKDYTLNVYRLALKTTLKR | |
| | ARRSMELIAREDENPKVAEVIYPIMQVNAIHYPGVDVAVGGM | |
| | EQRKIHMLARELLPKKVVCIHNPVLTGLDGEGKMSSSKGNFIA | |
| | VDDSPEEIRAKIKKAYCPAGVVEGNPIMEIAKYFLEYPLTIKRP | |
| | EKFGGDLTVSSYEELESLFKNKELHPMDLKNAVAEELIKILEPI | |
| | RKRL | |
| TyrRS(SS12) | MDEFEMIKRNTSEIISEEELREVLKKDEKSALIGFEPSGKIHLGH | 331 |
| | YLQIKKMIDLQNAGFDIIILLADLHAYLNQKGELDEIRKIGDYN | |
| | KKVFEAMGLKAKYVYGSEFQLDKDYTLNVYRLALKTTLKRA | |
| | RRSMELIAREDENPKVAEVIYPIMQVNPAHYQGVDVVVGGM | |
| | EQRKIHMLARELLPKKVVCIHNPVLTGLDGEGKMSSSKGNFIA | |
| | VDDSPEEIRAKIKKAYCPAGVVEGNPIMEIAKYFLEYPLTI | |
| p-iPr-PheRS | MDEFEMIKRNTSEIISEEELREVLKKDEKSAGIGFEPSGKIHLG | 332 |
| | HYLQIKKMIDLQNAGFDIIILLADLHAYLNQKGELDEIRKIGDY | |
| | NKKVFEAMGLKAKCAYGSPFQLDKDYTLNVYRLALKTTLKR | |
| | ARRSMELIAREDENPKVAEVIYPIMQVNGYHYLGVDVAVGG | |
| | MEQRKIHMLARELLPKKVVCIHNPVLTGLDGEGKMSSSKGNF | |
| | IAVDDSPEEIRAKIKKAYCPAGVVEGNPIMEIAKYFLEYPLTIK | |
| | RPEKFGGDLTVNSYEELESLFKNKELHPMDLKNAVAEELIKIL | |
| | EPIRKRL | |
| p-NH2-PheRS(1) | MDEFEMIKRNTSEIISEEELREVLKKDEKSAQIGFEPSGKIHLG | 333 |
| | HYLQIKKMIDLQNAGFDIIILLADLHAYLNQKGELDEIRKIGDY | |
| | NKKVFEAMGLKAKYVYGSPFQLDKDYTLNVYRLALKTTLKR | |
| | ARRSMELIAREDENPKVAEVIYPIMQVNCSHYYGVDVAVGG | |
| | MEQRKIHMLARELLPKKVVCIHNPVLTGLDGEGKMSSSKGNF | |
| | IAVDDSPEEIRAKIKKAYCPAGVVEGNPIMEIAKYFLEYPLTIK | |
| | RPEKFGGDLTVNSYEELESLFKNKELHPMDLKNAVAEELIKIL | |
| | EPIRKRL | |
| p-NH2-PheRS(2) | MDEFEMIKRNTSEIISEEELREVLKKDEKSATIGFEPSGKIHLGH | 334 |
| | YLQIKKMIDLQNAGFDIIILLADLHAYLNQKGELDEIRKIGDYN | |
| | KKVFEAMGLKAKYVYGSTFQLDKDYTLNVYRLALKTTLKRA | |
| | RRSMELIAREDENPKVAEVIYPIMQVNPLHYAGVDVAVGGME | |
| | QRKIHMLARELLPKKVVCIHNPVLTGLDGEGKMSSSKGNFIA | |
| | VDDSPEEIRAKIKKAYCPAGVVEGNPIMEIAKYFLEYPLTIKRP | |
| | EKFGGDLTVNSYEELESLFKNKELHPMDLKNAVAEELIKILEPI | |
| | RKRL | |
| p-NH2-PheRS(3a) | MDEFEMIKRNTSEIISEEELREVLKKDEKSAHIGFEPSGKIHLG | 335 |
| | HYLQIKKMIDLQNAGFDIIILLADLHAYLNQKGELDEIRKIGDY | |
| | NKKVFEAMGLKAKYVYGSEFQLDKDYTLNVYRLALKTTLKR | |
| | ARRSMELIAREDENPKVAEVIYPIMQVNRPHYLGVDVAVGG | |
| | MEQRKIHMLARELLPKKVVCIHNPVLTGLDGEGKMSSSKGNF | |
| | IAVDDSPEEIRAKIKKAYCPAGVVEGNPIMEIAKYFLEYPLTIK | |
| | RPEKFGGDLTVNSYEELESLFKNKELHPMDLKNAVAEELIKIL | |
| | EPIRKRL | |
| p-NH2-PheRS(3b) | MDEFEMIKRNTSEIISEEELREVLKKDEKSAQIGFEPSGKIHLG | 336 |
| | HYLQIKKMIDLQNAGFDIIILLADLHAYLNQKGELDEIRKIGDY | |
| | NKKVFEAMGLKAKYVYGSPFQLDKDYTLNVYRLALKTTLKR | |
| | ARRSMELIAREDENPKVAEVIYPIMQVNQSHYDGVDVAVGG | |
| | MEQRKIHMLARELLPKKVVCIHNPVLTGLDGEGKMSSSKGNF | |
| | IAVDDSPEEIRAKIKKAYCPAGVVEGNPIMEIAKYFLEYPLTIK | |
| | RPEKFGGDLTVNSYEELESLFKNKELHPMDLKNAVAEELIKIL | |
| | EPIRKRL | |
| O-Allyl-TyrRS(1) | MDEFEMIKRNTSEIISEEELREVLKKDEKSASIGFEPSGKIHLGH | 337 |
| | YLQIKKMIDLQNAGFDIIILLADLHAYLNQKGELDEIRKIGDYN | |
| | KKVFEAMGLKAKYVYGSTFQLDKDYTLNVYRLALKTTLKRA | |
| | RRSMELIAREDENPKVAEVIYPIMQVNTYHYAGVDVAVGGM | |
| | EQRKIHMLARELLPKKVVCIHNPVLTGLDGEGKMSSSKGNFIA | |
| | VDDSPEEIRAKIKKAYCPAGVVEGNPIMEIAKYFLEYPLTIKRP | |
| | EKFGGDLTVNSYEELESLFKNKELHPMDLKNAVAEELIKILEPI | |
| | RKRL | |
| O-Allyl-TyrRS(3) | MDEFEMIKRNTSEIISEEELREVLKKDEKSAPIGFEPSGKIHLGH | 338 |
| | YLQIKKMIDLQNAGFDIIILLADLHAYLNQKGELDEIRKIGDYN | |
| | KKVFEAMGLKAKYVYGSMFQLDKDYTLNVYRLALKTTLKR | |
| | ARRSMELIAREDENPKVAEVIYPIMQVNNTHYGGVDVAVGG | |
| | MEQRKIHMLARELLPKKVVCIHNPVLTGLDGEGKMSSSKGNF | |
| | IAVDDSPEEIRAKIKKAYCPAGVVEGNPIMEIAKYFLEYPLTIK | |
| | RPEKFGGDLTVNSYEELESLFKNKELHPMDLKNAVAEELIKIL | |
| | EPIRKRL | |
| O-Allyl-TyrRS(4) | MDEFEMIKRNTSEIISEEELREVLKKDEKSATIGFEPSGKIHLGH | 339 |
| | YLQIKKMIDLQNAGFDIIILLADLHAYLNQKGELDEIRKIGDYN | |
| | KKVFEAMGLKAKYVYGSHFQLDKDYTLNVYRLALKTTLKRA | |
| | RRSMELIAREDENPKVAEVIYPIMQVNQTHYEGVDVAVGGM | |
| | EQRKIHMLARELLPKKVVCIHNPVLTGLDGEGKMSSSKGNFIA | |
| | VDDSPEEIRAKIKKAYCPAGVVEGNPIMEIAKYFLEYPLTIKRP | |
| | EKFGGDLTVNSYEELESLFKNKELHPMDLKNAVAEELIKILEPI | |
| | RKRL | |
| p-Br-PheRS | MDEFEMIKRNTSEIISEEELREVLKKDEKSAHIGFEPSGKIHLG | 340 |
| | HYLQIKKMIDLQNAGFDIIILLADLHAYLNQKGELDEIRKIGDY | |
| | NKKVFEAMGLKAKYVYGSKFQLDKDYTLNVYRLALKTTLKR | |
| | ARRSMELIAREDENPKVAEVIYPIMQVNPCHYHGVDVAVGG | |
| | MEQRKIHMLARELLPKKVVCIHNPVLTGLDGEGKMSSSKGNF | |
| | IAVDDSPEEIRAKIKKAYCPAGVVEGNPIMEIAKYFLEYPLTIK | |
| | RPEKFGGDLTVNSYEELESLFKNKELHPMDLKNAVAEELIKIL | |
| | EPIRKRL | |
| p-Az-PheRS(1) | MDEFEMIKRNTSEIISEEELREVLKKDEKSAAIGFEPSGKIHLG | 341 |
| | HYLQIKKMIDLQNAGFDIIILLADLHAYLNQKGELDEIRKIGDY | |
| | NKKVFEAMGLKAKYVYGSRFQLDKDYTLNVYRLALKTTLKR | |
| | ARRSMELIAREDENPKVAEVIYPIMQVNVYHYDGVDVAVGG | |
| | MEQRKIHMLARELLPKKVVCIHNPVLTGLDGEGKMSSSKGNF | |
| | IAVDDSPEEIRAKIKKAYCPAGVVEGNPIMEIAKYFLEYPLTIK | |
| | RPEKFGGDLTVNSYEELESLFKNKELHPMDLKNAVAEELIKIL | |
| | EPIRKRL | |
| p-Az-PheRS(3) | MDEFEMIKRNTSEIISEEELREVLKKDEKSAGIGFEPSGKIHLG | 342 |
| | HYLQIKKMIDLQNAGFDIIILLADLHAYLNQKGELDEIRKIGDY | |
| | NKKVFEAMGLKAKYVYGSTFQLDKDYTLNVYRLALKTTLKR | |
| | ARRSMELIAREDENPKVAEVIYPIMQVNTYYYLGVDVAVGG | |
| | MEQRKIHMLARELLPKKVVCIHNPVLTGLDGEGKMSSSKGNF | |
| | IAVDDSPEEIRAKIKKAYCPAGVVEGNPIMEIAKYFLEYPLTIK | |
| | RPEKFGGDLTVNSYEELESLFKNKELHPMDLKNAVAEELIKIL | |
| | EPIRKRL | |
| p-Az-PheRS(5) | MDEFEMIKRNTSEIISEEELREVLKKDEKSALIGFEPSGKIHLGH | 343 |
| | YLQIKKMIDLQNAGFDIIILLADLHAYLNQKGELDEIRKIGDYN | |
| | KKVFEAMGLKAKYVYGSPFQLDKDYTLNVYRLALKTTLKRA | |
| | RRSMELIAREDENPKVAEVIYPIMQVNQIHSSGVDVAVGGME | |
| | QRKIHMLARELLPKKVVCIHNPVLTGLDGEGKMSSSKGNFIA | |
| | VDDSPEEIRAKIKKAYCPAGVVEGNPIMEIAKYFLEYPLTIKRP | |
| | EKFGGDLTVNSYEELESLFKNKELHPMDLKNAVAEELIKILEPI | |
| | RKRL | |
| mutant ORS to | MDEFEMIKRNTSEIISEEELREVLKKDEKSADIGFEPSGKIHLG | 344 |
| incorporate m-acyl | HYLQIKKMIDLQNAGFDIIILLADLHAYLNQKGELDEIRKIGDY | |
| phenylalanine into | NKKVFEAMGLKAKYVYGSEFQLDKDYTLNVYRLALKTTLKR | |
| proteins (ketone 3- | ARRSMELIAREDENPKVAEVIYPIMQVNGMHYQGVDVAVGG | |
| 4) | MEQRKIHMLARELLPKKVVCIHNPVLTGLDGEGKMSSSKGNF | |
| | IAVDDSPEEIRAKIKKAYCPAGVVEGNPIMEIAKYFLEYPLTIK | |
| | RPEKFGGDLTVNSYEELESLFKNKELHPMDLKNAVAEELIKIL | |
| | EPIRKRL | |
| mutant ORS to | MDEFEMIKRNTSEIISEEELREVLKKDEKSAYIGFEPSGKIHLG | 345 |
| incorporate m-acyl | HYLQIKKMIDLQNAGFDIIILLADLHAYLNQKGELDEIRKIGDY | |
| phenylalanine into | NKKVFEAMGLKAKYVYGSLFQLDKDYTLNVYRLALKTTLKR | |
| proteins (ketone 3- | ARRSMELIAREDENPKVAEVIYPIMQVNDIHYTGVDVAVGGM | |
| 7) | EQRKIHMLARELLPKKVVCIHNPVLTGLDGEGKMSSSKGNFIA | |
| | VDDSPEEIRAKIKKAYCPAGVVEGNPIMEIAKYFLEYPLTIKRP | |
| | EKFGGDLTVNSYEELESLFKNKELHPMDLKNAVAEELIKILEPI | |
| | RKRL | |
| mutant ORS to | MDEFEMIKRNTSEIISEEELREVLKKDEKSALIGFEPSGKIHLGH | 346 |
| incorporate m-acyl | YLQIKKMIDLQNAGFDIIILLTDLNAYLNQKGELDEIRKIGDYN | |
| phenylalanine into | KKVFEAMGLKAKYVYGSEFQLDKDYTLNVYRLALKTTLKRA | |
| proteins (ketone 4- | RRSMELIAREDENPKVAEVIYPIMQVNDIHYLGVDVAVGGME | |
| 1) | QRKIHMLARELLPKKVVCIHNPVLTGLDGEGKMSSSKGNFIA | |
| | VDDSPEEIRAKIKKAYCPAGVVEGNPIMEIAKYFLEYPLTIKRP | |
| | EKFGGDLTVNSYEELESLFKNKELHPMDLKNAVAEELIKILEPI | |
| | RKRL | |
| mutant ORS to | MDEFEMIKRNTSEIISEEELREVLKKDEKSALIGFEPSGKIHLGH | 347 |
| incorporate m-acyl | YLQIKKMIDLQNAGFDIIILLTDLKAYLNQKGELDEIRKIGDYN | |
| phenylalanine into | KKVFEAMGLKAKYVYGSEFQLDKDYTLNVYRLALKTTLKRA | |
| proteins (ketone 5- | RRSMELIAREDENPKVAEVIYPIMSVNVIHYLGVDVVVGGME | |
| 4) | QRKIHMLARELLPKKVVCIHNPVLTGLDGEGKMSSSKGNFIA | |
| | VDDSPEEIRAKIKKAYCPAGVVEGNPIMEIAKYFLEYPLTIKRP | |
| | EKFGGDLTVNSYEELESLFKNKELHPMDLKNAVAEELIKILEPI | |
| | RKRL | 348 |
| mutant ORS to | MDEFEMIKRNTSEIISEEELREVLKKDEKSALIGFEPSGKIHLGH | |
| incorporate m-acyl | YLQIKKMIDLQNAGFDIIILLPDLSAYLNQKGELDEIRKIGDYN | |
| phenylalanine into | KKVFEAMGLKAKYVYGSEFQLDKDYTLNVYRLALKTTLKRA | |
| proteins (ketone 6- | RRSMELIAREDENPKVAEVIYPIMQVNDIHYLGVDVAVGGME | |
| 8) | QRKIHMLARELLPKKVVCIHNPVLTGLDGEGKMSSSKGNFIA | |
| | VDDSPEEIRAKIKKAYCPAGVVEGNPIMEIAKYFLEYPLTIKRP | |
| | EKFGGDLTVNSYEELESLFKNKELHPMDLKNAVAEELIKILEPI | |
| | RKRL | |
| mutant ORS to | MDEFEMIKRNTSEIISEEELREVLKKDEKSATIGFEPSGKIHLGH | 349 |
| incorporate m- | YLQIKKMIDLQNAGFDIIILLADLHAYLNQKGELDEIRKIGDYN | |
| methoxy | KKVFEAMGLKAKYVYGSEFQLDKDYTLNVYRLALKTTLKRA | |
| phenylalanine into | RRSMELIAREDENPKVAEVIYPIMQVNDIHYAGVDVAVGGME | |
| proteins (OMe 1- | QRKIHMLARELLPKKVVCIHNPVLTGLDGEGKMSSSKGNFIA | |
| 6) | VDDSPEEIRAKIKKAYCPAGVVEGNPIMEIAKYFLEYPLTIKRP | |
| | EKFGGDLTVNSYEELESLFKNKELHPMDLKNAVAEELIKILEPI | |
| | RKRL | |
| mutant ORS to | MDEFEMIKRNTSEIISEEELREVLKKDEKSATIGFEPSGKIHLGH | 350 |
| incorporate m- | YLQIKKMIDLQNAGFDIIILLSDLPAYLNQKGELDEIRKIGDYN | |
| methoxy | KKVFEAMGLKAKYVYGSEFQLDKDYTLNVYRLALKTTLKRA | |
| phenylalanine into | RRSMELIAREDENPKVAEVIYPIMQVNDIHYLGVDVAVGGME | |
| proteins (OMe 1- | QRKIHMLARELLPKKVVCIHNPVLTGLDGEGKMSSSKGNFIA | |
| 8) | VDDSPEEIRAKIKKAYCPAGVVEGNPIMEIAKYFLEYPLTIKRP | |
| | EKFGGDLTVNSYEELESLFKNKELHPMDLKNAVAEELIKILEPI | |
| | RKRL | |
| mutant ORS to | MDEFEMIKRNTSEIISEEELREVLKKDEKSATIGFEPSGKIHLGH | 351 |
| incorporate m- | YLQIKKMIDLQNAGFDIIILLADLHAYLNQKGELDEIRKIGDYN | |
| methoxy | KKVFEAMGLKAKYVYGSMFQLDKDYTLNVYRLALKTTLKR | |
| phenylalanine into | ARRSMELIAREDENPKVAEVIYPIMQVNSSHYDGVDVAVGG | |
| proteins (OMe 2- | MEQRKIHMLARELLPKKVVCIHNPVLTGLDGEGKMSSSKGNF | |
| 7) | IAVDDSPEEIRAKIKKAYCPAGVVEGNPIMEIAKYFLEYPLTIK | |
| | RPEKFGGDLTVNSYEELESLFKNKELHPMDLKNAVAEELIKIL | |
| | EPIRKRL | |
| mutant ORS to | MDEFEMIKRNTSEIISEEELREVLKKDEKSAQIGFEPSGKIHLG | 352 |
| incorporate m- | HYLQIKKMIDLQNAGFDIIILLPDLHAYLNQKGELDEIRKIGDY | |
| methoxy | NKKVFEAMGLKAKYVYGSEFQLDKDYTLNVYRLALKTTLKR | |
| phenylalanine into | ARRSMELIAREDENPKVAEVIYPIMQVNDIHYLGVDVDVGGM | |
| proteins (OMe 4- | EQRKIHMLARELLPKKVVCIHNPVLTGLDGEGKMSSSKGNFIA | |
| 1) | VDDSPEEIRAKIKKAYCPAGVVEGNPIMEIAKYFLEYPLTIKRP | |
| | EKFGGDLTVNSYEELESLFKNKELHPMDLKNAVAEELIKILEPI | |
| | RKRL | |
| mutant ORS to | MDEFEMIKRNTSEIISEEELREVLKKDEKSAHIGFEPSGKIHLG | 353 |
| incorporate m- | HYLQIKKMIDLQNAGFDIIILLADLHAYLNQKGELDEIRKIGDY | |
| methoxy | NKKVFEAMGLKAKYVYGSAFQLDKDYTLNVYRLALKTTLKR | |
| phenylalanine into | ARRSMELIAREDENPKVAEVIYPIMQVNGHHYIGVDVAVGGM | |
| proteins (OMe 4- | EQRKIHMLARELLPKKVVCIHNPVLTGLDGEGKMSSSKGNFIA | |
| 8) | VDDSPEEIRAKIKKAYCPAGVVEGNPIMEIAKYFLEYPLTIKRP | |
| | EKFGGDLTVNSYEELESLFKNKELHPMDLKNAVAEELIKILEPI | |
| | RKRL | |
| mutant ORS to | MDEFEMIKRNTSEIISEEELREVLKKDEKSAYIGFEPSGKIHLG | 354 |
| incorporate p-O- | HYLQIKKMIDLQNAGFDIIILLADLHAYLNQKGELDEIRKIGDY | |
| allyl tyrosine into | NKKVFEAMGLKAKYVYGSAFQLDKDYTLNVYRLALKTTLKR | |
| proteins | ARRSMELIAREDENPKVAEVIYPIMQVNCAHYLGVDVAVGG | |
| | MEQRKIHMLARELLPKKVVCIHNPVLTGLDGEGKMSSSKGNF | |
| | IAVDDSPEEIRAKIKKAYCPAGVVEGNPIMEIAKYFLEYPLTIK | |
| | RPEKFGGDLTVNSYEELESLFKNKELHPMDLKNAVAEELIKIL | |
| | EPIRKRL | |
| ORS for the | MDEFEMIKRNTSEIISEEELREVLKKDEKSAGIGFEPSGKIHLG | 355 |
| incorporation of p- | HYLQIKKMIDLQNAGFDIIILLADLHAYLNQKGELDEIRKIGDY | |
| benzoyl-L- | NKKVFEAMGLKAKYVYGSSFQLDKDYTLNVYRLALKTTLKR | |
| phenylalanine (p- | ARRSMELIAREDENPKVAEVIYPIMQVNTSHYLGVDVAVGGM | |
| BpaRS(H6)) | EQRKIHMLARELLPKKVVCIHNPVLTGLDGEGKMSSSKGNFIA | |
| | VDDSPEEIRAKIKKAYCPAGVVEGNPIMEIAKYFLEYPLTIKRP | |
| | EKFGGDLTVNSYEELESLFKNKELHPMDLKNAVAEELIKILEPI | |
| | RKRL | |
| ORS for the | MDEFEMIKRNTSEIISEEELREVLKKDEKSATIGFEPSGKIHLGH | 356 |
| incorporation of p- | YLQIKKMIDLQNAGFDIIILLADLHAYLNQKGELDEIRKIGDYN | |
| azido- | KKVFEAMGLKAKYVYGSNFQLDKDYTLNVYRLALKTTLKRA | |
| phenylalanine p- | RRSMELIAREDENPKVAEVIYPIMQVNPLHYQGVDVAVGGME | |
| Az-PheRS(3) | QRKIHMLARELLPKKVVCIHNPVLTGLDGEGKMSSSKGNFIA | |
| | VDDSPEEIRAKIKKAYCPAGVVEGNPIMEIAKYFLEYPLTIKRP | |
| | EKFGGDLTVNSYEELESLFKNKELHPMDLKNAVAEELIKILEPI | |
| | RKRL | |
| ORS for the | MDEFEMIKRNTSEIISEEELREVLKKDEKSATIGFEPSGKIHLGH | 357 |
| incorporation of p- | YLQIKKMIDLQNAGFDIIILLADLHAYLNQKGELDEIRKIGDYN | |
| azido- | KKVFEAMGLKAKYVYGSSFQLDKDYTLNVYRLALKTTLKRA | |
| phenylalanine p- | RRSMELIAREDENPKVAEVIYPIMQVNPLHYQGVDVAVGGME | |
| Az-PheRS(6) | QRKIHMLARELLPKKVVCIHNPVLTGLDGEGKMSSSKGNFIA | |
| | VDDSPEEIRAKIKKAYCPAGVVEGNPIMEIAKYFLEYPLTIKRP | |
| | EKFGGDLTVNSYEELESLFKNKELHPMDLKNAVAEELIKILEPI | |
| | RKRL | |
| ORS for the | MDEFEMIKRNTSEIISEEELREVLKKDEKSALIGFEPSGKIHLGH | 358 |
| incorporation of p- | YLQIKKMIDLQNAGFDIIILLADLHAYLNQKGELDEIRKIGDYN | |
| azido- | KKVFEAMGLKAKYVYGSTFQLDKDYTLNVYRLALKTTLKRA | |
| phenylalanine p- | RRSMELIAREDENPKVAEVIYPIMQVNPVHYQGVDVAVGGM | |
| Az-PheRS(20) | EQRKIHMLARELLPKKVVCIHNPVLTGLDGEGKMSSSKGNFIA | |
| | VDDSPEEIRAKIKKAYCPAGVVEGNPIMEIAKYFLEYPLTIKRP | |
| | EKFGGDLTVNSYEELESLFKNKELHPMDLKNAVAEELIKILEPI | |
| | RKRL | |
| ORS for the | MDEFEMIKRNTSEIISEEELREVLKKDEKSATIGFEPSGKIHLGH | 359 |
| incorporation of p- | YLQIKKMIDLQNAGFDIIILLADLHAYLNQKGELDEIRKIGDYN | |
| azido- | KKVFEAMGLKAKYVYGSSFQLDKDYTLNVYRLALKTTLKRA | |
| phenylalanine p- | RRSMELIAREDENPKVAEVIYPIMQVNPSHYQGVDVAVGGME | |
| Az-PheRS(24) | QRKIHMLARELLPKKVVCIHNPVLTGLDGEGKMSSSKGNFIA | |
| | VDDSPEEIRAKIKKAYCPAGVVEGNPIMEIAKYFLEYPLTIKRP | |
| | EKFGGDLTVNSYEELESLFKNKELHPMDLKNAVAEELIKILEPI | |
| | RKRL | |
| Archaeoglobus | MSDFRIIEEKWQKAWEKDRIFESDPNEKEKFFLTIPYPYLNGN | 360 |
| fulgidus leucyl | LHAGHTRTFTIGDAFARYMRMKGYNVLFPLGFHVTGTPIIGLA | |
| tRNA-synthetase | ELIAKRDERTIEVYTKYHDVPLEDLLQLTTPEKIVEYFSREALQ | |
| (AFLRS) | ALKSIGYSIDWRRVFTTTDEEYQRFIEWQYWKLKELGLIVKGT | |
| | HPVRYCPHDQNPVEDHDLLAGEEATIVEFTVIKFRLEDGDLIFP | |
| | CATLRPETVFGVTNIWVKPTTYVIAEVDGEKWFVSKEAYEKL | |
| | TYTEKKVRLLEEVDASQFFGKYVIVPLVNRKVPILPAEFVDTD | |
| | NATGVVMSVPAHAPFDLAAIEDLKRDEETLAKYGIDKSVVESI | |
| | KPIVLIKTDIEGVPAEKLIRELGVKSQKDKELLDKATKTLYKK | |
| | EYHTGIMLDNTMNYAGMKVSEAKERVHEDLVKLGLGDVFY | |
| | EFSEKPVICRCGTKCVVKVVRDQWFLNYSNREWKEKVLNHL | |
| | EKMRIIPDYYKEEFRNKIEWLRDKACARRKGLGTRIPWDKEW | |
| | LIESLSDSTIYMAYYILAKYINAGLLKAENMTPEFLDYVLLGK | |
| | GEVGKVAEASKLSVELIQQIRDDFEYWYPVDLRSSGKDLVAN | |
| | HLLFYLFHHVAIFPPDKWPRAIAVNGYVSLEGKKMSKSKGPL | |
| | LTMKRAVQQYGADVTRLYILHAAEYDSDADWKSREVEGLA | |
| | NHLRRFYNLVKENYLKEVGELTTLDRWLVSRMQRAIKEVRE | |
| | AMDNLQTRRAVNAAFFELMNDVRWYLRRGGENLAIILDDWI | |
| | KLLAPFAPHICEELWHLKHDSYVSLESYPEYDETRVDEEAERI | |
| | EEYLRNLVEDIQEIKKFVSDAKEVYIAPAEDWKVKAAKVVAE | |
| | SGDVGEAMKQLMQDEELRKLGKEVSNFVKKIFKDRKKLMLV | |
| | KEWEVLQQNLKFIENETGLKVILDTQRVPEEKRRQAVPGKPAI | |
| | YVA | |
| Methanobacterium | VDTERKWRDRWRDAGIFQADPDDREKIFLTVAYPYPSGAMHI | 361 |
| thermoautotrophicum | GHGRTYTVPDVYARFKRMQGYNVLFPMAWHVTGAPVIGIAR | |
| leucyl tRNA- | RIQRKDPWTLKIYREVHRVPEDELERFSDPEYIVEYFSREYRSV | |
| synthetase | MEDMGYSIDWRREFKTTDPTYSRFIQWQIRRLRDLGLVRKGA | |
| (MtLRS) | HPVKYCPECENPVGDHDLLEGEGVAINQLTLLKFKLGDSYLV | |
| | AATFRPETIYGATNLWLNPDEDYVRVETGGEEWIISRAAVDN | |
| | LSHQKLDLKVSGDVNPGDLIGMCVENPVTGQEHPILPASFVDP | |
| | EYATGVVFSVPAHAPADFIALEDLRTDHELLERYGLEDVVADI | |
| | EPVNVIAVDGYGEFPAAEVIEKFGVRNQEDPRLEDATGELYKI | |
| | EHARGVMSSHIPVYGGMKVSEAREVIADELKDQGLADEMYE | |
| | FAERPVICRCGGRCVVRVMEDQWFMKYSDDAWKDLAHRCL | |
| | DGMKIIPEEVRANFEYYIDWLNDWACSRRIGLGTRLPWDERW | |
| | IIEPLTDSTIYMAYYTIAHRLREMDAGEMDDEFFDAIFLDDSGT | |
| | FEDLREEFRYWYPLDWRLSAKDLIGNHLTFHIFHHSAIFPESG | |
| | WPRGAVVFGMGLLEGNKMSSSKGNVILLRDAIEKHGADVVR | |
| | LFLMSSAEPWQDFDWRESEVIGTRRRIEWFREFGERVSGILDG | |
| | RPVLSEVTPAEPESFIGRWNMGQLNQRIREATRALESFQTRKA | |
| | VQEALYLLKKDVDHYLKRVEGRVDDEVKSVLANVLHAWIRL | |
| | MAPFIPYTAEEMNERYGGEGFVAEAPWPDFSDDAESRDVQV | |
| | AEEMVQNTVRDIQEIMKILGSTPERVHIYTSPKWRWDVLRVA | |
| | AEVGKLDMGSIMGRVSAEGIHDNMKEVAEFVRRIIRDLGRSE | |
| | VTVIDEYSVLMDASDYIESEVGARVVIHSKPDYDPENKAVNA | |
| | VPLKPAIYLE | |

### Example 3: High-Throughput Incorporation of Unnatural Amino Acids in Living Cells

[0217] The ability to study cellular systems and the mechanisms that drive disease-relevant and fundamental biological processes relies on a suite of chemical and genetic perturbagens to interrogate these complex systems in situ using experimental paradigms as close to the native state as possible. Several tools have been designed to modulate biological systems at the different layers of function and information flow; namely, the DNA, epigenome, RNA, and protein levels. Accurate alteration and control of each of these layers of biological function has provided valuable insights, and has led to the identification of new ways to modulate disease as well as novel therapeutic protein targets for small molecules. Despite these advances, there are remarkably few programmable tools that can be applied towards unbiased high-throughput interrogation of the proteome in living cells. Currently available paradigms are used to study individual proteins, or at best small collections of proteins. Medium-throughput screening modalities have been engineered for specific families of proteins, for example in activity-based protein profiling (ABPP), but these tools are limited to proteins whose enzymatic activity can be readily harnessed using a reactive biochemical handle. The examples provided herein illustrate a high-throughput system for the incorporation of functionalized unnatural amino acid for proteome-wide interrogation and profiling in living cells, which has significantly enhanced generality compared to current state-of-the-art methods (FIGS. 1 and 2).

[0218] Unnatural amino acid incorporation in living cells has been an established research tool for over a decade. David Liu and Peter Schultz (Scripps Research Institute) developed the methodology to incorporate novel chemical matter, functional groups, and bio-orthogonal chemical handles into full-length proteins⁸. Novel handles are incorporated using read-through of stop codons, which are pre-emptively introduced into the coding frame of a protein gene, for example⁹. A complementary tRNA that recognizes the novel stop codon sequence in the mRNA can be used to rescue, or suppress, the formation of truncated proteins (FIG. 1). The rescuing tRNA can be charged with a variety of natural and unnatural amino acids using evolved amino acyl-tRNA synthetases that lead to the introduction of new chemical handles into the protein of interest (FIG. 1). Stop codon suppression has been achieved using vast assortment of chemical handles, like azide and alkyne tags¹⁰, fluorescent markers, and covalent bond forming adducts, etc.^{11,12} (FIG. 3). The limitation of this approach is that stop codons must be introduced into each gene of interest, usually in a conservative and structurally benign site, and likewise each individual protein must be altered in a new cell line¹³. This approach requires laborious researcher intervention, which has hitherto prohibited high-throughput screening campaigns using this technology. Recent work has produced a CRISPR/Cas9 reagent, called Base Editor 3 (BE3), as well as variants BE2 and BE1, that convert cytosine (C) to thymidine (T) in DNA by catalyzing a cytosine-deamination reaction to uridine (U) in a genomic DNA location programmed by a guide-RNA sequence¹⁴. The mutational repertoire of BE3 includes the transformation of 5 codons for glutamine, arginine, and tryptophan into the 3 stop codons (Table 4). The possible target codons include 5 out of 61 amino acid-encoding codons (>8%), making it likely that a protein can be mutated to contain a stop codon using base editing. Polar amino acids, like arginine and glutamine, are statistically enriched in surface-exposed regions of proteins, and tryptophan is statistically overrepresented in protein-protein interactions regions (hot-spots). These characteristics render these 5 codons particularly useful for replacement with unnatural functionalized amino acids to introduce bio-orthogonal handles on the surface of any protein of interest, or in an unbiased high-throughput programmable manner.

[0219] Several example applications enabled by the use of base-editing reagents (e.g. BE3) to introduce stop codons into protein coding sequences and incorporate novel chemical functionalities in a high-throughput and programmable manner are described. This platform can enable a number of unbiased large-scale research applications to study proteins in the native cellular context (FIGS. 1 and 2). Moreover, the orthogonal suppression of more than one stop codon within one cell to orchestrate multiple unnatural amino acid incorporations into a variety of protein targets is described.

TABLE 4
Stop-codon suppression using high-throughput programmable
base-editing tools

| | | | | Stop |
|---|---|---|---|---|
| Target | Amino acid | | Edited | codon |
| codon | (abbreviation) | Base-editing outcome(s) | codon | name |
| CAG | Glutamine (Gln/Q) | 1^{st} base C [symbol] T coding | TAG | Amber |
| | | strand | | |
| TGG | Tryptophan | 2^{nd} base C [symbol] T on | TAG | Amber |
| | (Trp/W) | complementary strand | | |
| CGA | Arginine (Arg/R) | 1^{st} base C [symbol] T coding | TGA | Opal |
| | | strand | | |
| CAA | Glutamine (Gln/Q) | 1^{st} base C [symbol] T coding | TAA | Ochre |
| | | strand | | |
| TGG | Tryptophan | 3^{rd} base C [symbol] T on | UGA | Opal |
| | (Trp/W) | complementary strand | | |
| CGG | Arginine (Arg/R) | 1^{st} base C [symbol] T on coding | TAG | Amber |
| | | strand and 2^{nd} base C [symbol] T | | |
| | | on complementary strand | | |
| CGA | Arginine (Arg/R) | 1^{st} base C [symbol] T on coding | TAA | Ochre |
| | | strand and 2^{nd} base C [symbol] T | | |
| | | on complementary strand | | |

Application 1: Incorporation of Unnatural Amino Acids with Reactive Side-Chain Handles in a Guide-RNA Sequence-Specific Manner into Protein-Coding Genes in Living Cells to Conduct High-Throughput Protein Degradation Screening by Recruitment of Ubiquitin-Ligase Enzymes

[0220] The ability to study protein degradation in a high-throughput and quantifiable manner has been difficult to execute to date. This platform is important to study because genetic perturbation of all proteins using either CRISPR/Cas9 or siRNA may be both toxic to cells when essential genes are modified and because the effects of a small molecule will not be recapitulated due to the long-lasting nature of the modification. Current technologies to degrade proteins are limited in their throughput. First, proteins of interest can be targeted for degradation if a small molecule ligand exists that binds to the target^{17,18}. This approach relies on ligand discovery, which can be time intensive and is inherently limited in throughput. An alternative strategy leads to protein degradation by tagging the target of interest with degradation-inducing tags. Such systems, like the auxin degradation system¹⁹, could be generated using a number of different protein tags; however, these approaches are limited by introducing such a tag onto the protein of interest. Protein tagging is therefore limited in its throughput and generality because protein tagging may alter the native function of the protein.

[0221] It is believed that BE3 can be used to introduce stop codons that can be suppressed to introduce azide or alkyne handles into protein-coding regions in cells. BE3 can change C to T in DNA and thus can change native amino acids to stop codons. Stop codon suppression has been demonstrated for amber (UAG), ochre (UAA), and opal (UGA) stop codons. It is envisioned that glutamines (CAG) can be converted into an amber stop UAG in one step using BE3. All possible transformations to stop codons are highlighted in FIG. 8B. This amounts to a total of 5/61 (>8%) when native stop codons are excluded. If four letter codes are included, the total targetable space in the proteome increases dramatically. Notably, the targeted amino acids are often polar and therefore are often surface exposed. This improves the likelihood that the introduced novel amino acid will be readily accessible to reagents of our choosing. Furthermore, there is often more than one amino acid (e.g. multiple glutamine or arginine residues) that can be targeted in each protein, which improves the targetable scope of these experiments. Consequently, using this system to introduce azide handles into all proteins in a cell could be carried out. Integration of chemical handles into multiple proteins or multiple tags within one protein at a time will be desirable and is possible with complimentary suppressor systems.

[0222] Azide handles can be used for a number of chemical transformations; however, one preeminent use would be to conduct a proteome-wide degradation screen. By generating an alkyne-tagged ImID (FIG. 4), like thalidomide, each protein in a cell could be directed to the proteasome via cereblon (CRBN) dependent ubiquitination^{20,21}. Such a screen could be employed to study proteins where genetic perturbation leads to lethality to a cell, like essential genes, and can also be used to evaluate components of a complex where genetic knockout of important components leads to malfunctions and failures of the complex to assemble. This process can be used to identify drug targets in a high throughput and multiplex-able way. Multiple proteins can be degraded at once or complimentary activities can be encoded using this system where one protein is degraded while another is modified in another manner. Identification of unknown targets of bioactive small molecules using binding-based protein profiling and introduction of photo-crosslinking unnatural amino acids to generate protein-protein interactome maps

[0223] In addition to alkyne and azide handles, we believe that aziridine handles could be used to track protein complex formation. These amino acids bind adjacent protein surfaces together in a covalent manner. Thus, integration of such tags into proteins could help discern direct protein contacts made between each protein in a cell. Scanning using multiple target sites per protein will be necessary to generate full coverage of the interactome. It is believed that these tools could be integrated with small molecule screening platforms, RNAi screens, or CRIPSR gene knockout screening to identify small molecules that can perturb protein-protein interactions. Furthermore, using bulky residues that prevent protein binding can be used to identify interactions that drive biological phenomena. Notably, if orthogonal suppressor sets could be used, protein-protein interactions could be forced to test novel hypotheses about cellular function.

High-Throughput Phenotypic Screening in Living Cells by Perturbing Protein Sub-Cellular Localization in a Guide-RNA Sequence-Specific Manner, Coupling to Chemical Probes that Localize to the Nucleus, Mitochondria, and the Plasma Membrane and Modulation of Protein Function and/or Colocalization by Induction by Induction of a Covalent-Linkage Between Protein Partners Using a Halo-Tag, SNAP-Tag, CLIP-Tag Reagent¹⁵

[0224] The introduction of azide or alkyne tags into coding regions of proteins affords the opportunity to append novel signaling moieties to individual proteins of interest. Localization signals can be attached to any and all proteins in a consistent manner to study the effects of localization on the entire proteome. Three primary tags can be appended to proteins; namely, nuclear, membrane, and mitochondrial localization signals (FIGS. 5 and 6). Furthermore, it is believed that a variety of ligands can be appended to proteins of interest to study the effects of such modifications. For example, various lipids can be appended to proteins to alter their membrane-associated behaviors (e.g. myristolation, prenylation) (FIG. 5). This approach can be used to test all post-translational modifications in a programmable manner like phosphorylation, ubiquitination, acetylation, methylation, etc. It is also thought that the appendage of various metabolites to proteins of interest could be used to recruit various proteins and modifying enzymes to a target protein. This set of experiments could be tested using cellular components with programmable interactions like the SNAP-tag, Halo-tag, Rapamycin, and FK-506. It is also thought that these handles can be used for in-cell tracer experiments in a high throughput manner and that dual modulation using each of the three suppressor sets within one cell should allow simultaneous tracing of three cellular components in a programmable manner.

### Orthogonal Incorporation of Multiple Unnatural Amino Acids Using Multiple Guide-RNAs for Each of the Stop Codons

[0225] It is also believed that the ability to introduce orthogonal sets of suppressors (FIGS. 2 and 8) could be transformative. This capability could allow researchers to study the interactions of complex protein networks simultaneously in a living cell. Multiple complementary tracer molecules could be used to label multiple proteins in the same cell. This could also be used to simultaneously endow multiple proteins with different chemical functionalities. Protein-protein interactions could be altered while subcellular localization is changed for another target all while a third is being degraded.

[0226] In summary, it is believed that utilizing BE3 and guide-RNA libraries to introduce unnatural amino acids into the proteome of living cells holds significant promise as a platform for generating and testing biological hypotheses, and to aid in research and development of future therapeutics. The unbiased introduction of bio-orthogonal handles coupled with the DNA-sequencing readout of guide-RNAs is a highly desirable technology. The present disclosure enables unbiased high-throughput omic-type interrogation techniques previously applicable only at the genomic and transcriptomic levels to be performed with equal ease at the proteomic level.

### Example 4. Incorporation of Unnatural Amino Acids into BRD4 or PRSS2 Proteins

[0227] For illustration purpose only, the present disclosure further provides examples of unnatural amino acids incorporation into two proteins that are expressed in HEK293T cells, BRD4 and PRSS2. PRSS2 is a serine protease and BRD4 is a histone actyl lysine reader protein that is involved in regulating gene expression. These two proteins were selected for their diversity of subcellular localization and the number of reagents that can be used to assay their activity after the incorporation of unnatural amino acids.

[0228] Glutamine codons (CAG) in BRD4 (Q123, Q175, Q1323/Q1324, and Q1333) or PRSS2 (Q100, Q211, and Q236) are targeted to be converted to amber codons (TAG), because they are highly charged and likely to be surface exposed. The nucleobase editor used for the condon conversion is the rAPOBEC1-XTEN-Cas9 nickase-UGI-NLS fusion protein (designated BE3, SEQ ID NO: 295). Four gRNA sequences were designed for converting glutamine codons to amber codons in BRD4: GAATGCTCAGGAATGTATCC (targeting Q123, SEQ ID NO: 367), gATAGTCCAGGCAAAAGGAAG (targeting Q175, SEQ ID NO:368), ACCAGCAGAGGGAGTTGGCC (targeting Q1323/Q1324, SEQ ID NO: 369), and GGGAGCAGGAGCGAAGACGC (targeting Q1333, SEQ ID NO: 370). Three gRNA sequences were designed for converting glutamine codons to amber codons in PSSR2: GAATGAACAGTTCATCAATG (targeting Q100, SEQ ID NO: 371), gTCCTGCCAGGGTGATTCTGG (targeting Q211, SEQ ID NO: 372), and gTGTGCCCAGAAGAACAGGCC (targeting Q236, SEQ ID NO: 373).

[0229] Cells are plated at 30,000 cells/well in a 48 well dish and transiently transfected with 750 ng of the BE3 construct and 250 ng of each guide using lipofectamine. Three days after the initial transfection, 1 μg of the pAcBac2.tR4-OMeYRS/GFP* plasmid is used. This plasmid contains the E. coli Tyr ORS system and has two copies of the Tyr CUA tRNA as well as eGFP for a transfection and integration control to be used as a validation, where GFP can be pulled down using the click handle in subsequent experiemnts. See, Xiao et al., Angewandte Chemie, Volume 52, Issue 52, Pages 14080-14083, 2013, the entire contents of which is incorporated herein by reference.

[0230] Twenty-four hours after transfection, media is replaced with media containing the unnatural amino acid 4-h-azido-Phe-OH. Cells are allowed to grow in this media for 24 hours to allow the unnatural amino acids to be incorporated. The media is then supplemented with Cyclo-octyne PEG biotin for the attaching of biotin to the protein via the click chemistry handle in the unnatural amino acids. Cells are lysed and incubated for 6 hours at 4° C. with additional cyclo-octyne peg biotin to run the click reaction. Western Blot analysis using anti PRSS2 (Abcam) or anti BRD4 antibody (Bethyl) are used to visualize each band on the 680 channel while streptavidin dye was visualized on the 800 channel. Colocalization of the 680 bands and 800 bands for biotin attached via the click reaction biotin and the protein of interest are expected. High throughput sequencing can be used to evaluate the conversion rate of each base as described in Komor et al., Programmable editing of a target base in genomic DNA without double-stranded DNA cleavage, Nature, 533(7603):420-4, 2016, the entire contensts are incorporated herein by reference.

[0231] Subsequently, PRSS2 activity is assayed using FP-Biotin reagents in an activity based protein profiling (ABPP) type experiment. See, Liu et al., PNAS, vol. 96 no. 26, 14694-14699, 1999; Kidd et al., Biochemistry, 40(13):4005-15, 2001; Bachovchin et al., PNAS, vol. 107 no. 49, 20941-20946, 2010; and Bachovchin et al., Nat Chem Biol., 10(8):656-63, 2014, the entire contents of each of which are incorporated herein by reference.

[0232] BRD4 activity is assayed using JQ1, a BET bromodomain probe compound, in a number of robust biochemical and cellular assays as described in Filippakopoulos et al., Nature, 468(7327):1067-73, 2010; Andres et al., Nature Biotechnology, 32, 92-96, 2014; Roberts et al., Curr Protoc Chem Biol., 7(4):263-78, 2015, the entire contents of each of which are incorporated herein by reference.

BRD4 Nucleotide Sequence
(SEQ ID NO: 374)
ATGTCTGCGGAGAGCGGCCCTGGGACGAGATTGAGAAATCTGCCAGTAATGGGGG
ATGGACTAGAAACTTCCCAAATGTCTACAACACAGGCCCAGGCCCAACCCCAGCC
AGCCAACGCAGCCAGCACCAACCCCCCGCCCCCAGAGACCTCCAACCCTAACAAG
CCCAAGAGGCAGACCAACCAACTGCAATACCTGCTCAGAGTGGTGCTCAAGACAC
TATGGAAACACCAGTTTGCATGGCCTTTCCAGCAGCCTGTGGATGCCGTCAAGCTG
AACCTCCCTGATTACTATAAGATCATTAAAACGCCTATGGATATGGGAACAATAA
AGAAGCGCTTGGAAAACAACTATTACTGGAATGCTCAGGAATGTATCCAGGACTT
CAACACTATGTTTACAAATTGTTACATCTACAACAAGCCTGGAGATGACATAGTCT
TAATGGCAGAAGCTCTGGAAAAGCTCTTCTTGCAAAAAATAAATGAGCTACCCAC
AGAAGAAACCGAGATCATGATAGTCCAGGCAAAAGGAAGAGGACGTGGGAGGAA
AGAAACAGGGACAGCAAAACCTGGCGTTTCCACGGTACCAAACACAACTCAAGCA
TCGACTCCTCCGCAGACCCAGACCCCTCAGCCGAATCCTCCTCCTGTGCAGGCCAC
GCCTCACCCCTTCCCTGCCGTCACCCCGGACCTCATCGTCCAGACCCCTGTCATGA
CAGTGGTGCCTCCCCAGCCACTGCAGACGCCCCCGCCAGTGCCCCCCCAGCCACA
ACCCCCACCCGCTCCAGCTCCCCAGCCCGTACAGAGCCACCCACCCATCATCGCGG
CCACCCCACAGCCTGTGAAGACAAAGAAGGGAGTGAAGAGGAAAGCAGACACCA
CCACCCCCACCACCATTGACCCCATTCACGAGCCACCCTCGCTGCCCCCGGAGCCC
AAGACCACCAAGCTGGGCCAGCGGCGGGAGAGCAGCCGGCCTGTGAAACCTCCA
AAGAAGGACGTGCCCGACTCTCAGCAGCACCCAGCACCAGAGAAGAGCAGCAAG
GTCTCGGAGCAGCTCAAGTGCTGCAGCGGCATCCTCAAGGAGATGTTTGCCAAGA
AGCACGCCGCCTACGCCTGGCCCTTCTACAAGCCTGTGGACGTGGAGGCACTGGG
CCTACACGACTACTGTGACATCATCAAGCACCCCATGGACATGAGCACAATCAAG
TCTAAACTGGAGGCCCGTGAGTACCGTGATGCTCAGGAGTTTGGTGCTGACGTCCG
ATTGATGTTCTCCAACTGCTATAAGTACAACCCTCCTGACCATGAGGTGGTGGCCA
TGGCCCGCAAGCTCCAGGATGTGTTCGAAATGCGCTTTGCCAAGATGCCGGACGA
GCCTGAGGAGCCAGTGGTGGCCGTGTCCTCCCCGGCAGTGCCCCCTCCCACCAAG
GTTGTGGCCCCGCCCTCATCCAGCGACAGCAGCAGCGATAGCTCCTCGGACAGTG
ACAGTTCGACTGATGACTCTGAGGAGGAGCGAGCCCAGCGGCTGGCTGAGCTCCA
GGAGCAGCTCAAAGCCGTGCACGAGCAGCTTGCAGCCCTCTCTCAGCCCCAGCAG
AACAAACCAAAGAAAAAGGAGAAAGACAAGAAGGAAAAGAAAAAAGAAAAGCA
CAAAAGGAAAGAGGAAGTGGAAGAGAATAAAAAAAGCAAAGCCAAGGAACCTC
CTCCTAAAAAGACGAAGAAAAATAATAGCAGCAACAGCAATGTGAGCAAGAAGG
AGCCAGCGCCCATGAAGAGCAAGCCCCCTCCCACGTATGAGTCGGAGGAAGAGG
ACAAGTGCAAGCCTATGTCCTATGAGGAGAAGCGGCAGCTCAGCTTGGACATCAA
CAAGCTCCCCGGCGAGAAGCTGGGCCGCGTGGTGCACATCATCCAGTCACGGGAG
CCCTCCCTGAAGAATTCCAACCCCGACGAGATTGAAATCGACTTTGAGACCCTGA
AGCCGTCCACACTGCGTGAGCTGGAGCGCTATGTCACCTCCTGTTTGCGGAAGAA
AAGGAAACCTCAAGCTGAGAAAGTTGATGTGATTGCCGGCTCCTCCAAGATGAAG
GGCTTCTCGTCCTCAGAGTCGGAGAGCTCCAGTGAGTCCAGCTCCTCTGACAGCGA
AGACTCCGAAACAGAGATGGCTCCGAAGTCAAAAAAGAAGGGGCACCCCGGGAG
GGAGCAGAAGAAGCACCATCATCACCACCATCAGCAGATGCAGCAGGCCCCGGCT
CCTGTGCCCCAGCAGCCGCCCCCGCCTCCCCAGCAGCCCCCACCGCCTCCACCTCC
GCAGCAGCAACAGCAGCCGCCACCCCCGCCTCCCCCACCCTCCATGCCGCAGCAG
GCAGCCCCGGCGATGAAGTCCTCGCCCCCACCCTTCATTGCCACCCAGGTGCCCGT
CCTGGAGCCCCAGCTCCCAGGCAGCGTCTTTGACCCCATCGGCCACTTCACCCAGC
CCATCCTGCACCTGCCGCAGCCTGAGCTGCCCCCTCACCTGCCCCAGCCGCCTGAG
CACAGCACTCCACCCCATCTCAACCAGCACGCAGTGGTCTCTCCTCCAGCTTTGCA
CAACGCACTACCCCAGCAGCCATCACGGCCCAGCAACCGAGCCGCTGCCCTGCCT
CCCAAGCCCGCCCGGCCCCCAGCCGTGTCACCAGCCTTGACCCAAACACCCCTGCT
CCCACAGCCCCCCATGGCCCAACCCCCCCAAGTGCTGCTGGAGGATGAAGAGCCA
CCTGCCCCACCCCTCACCTCCATGCAGATGCAGCTGTACCTGCAGCAGCTGCAGAA
GGTGCAGCCCCCTACGCCGCTACTCCCTTCCGTGAAGGTGCAGTCCCAGCCCCCAC
CCCCCCTGCCGCCCCCACCCCACCCCTCTGTGCAGCAGCAGCTGCAGCAGCAGCCG
CCACCACCCCCACCACCCCAGCCCCAGCCTCCACCCCAGCAGCAGCATCAGCCCC
CTCCACGGCCCGTGCACTTGCAGCCCATGCAGTTTTCCACCCACATCCAACAGCCC
CCGCCACCCCAGGGCCAGCAGCCCCCCCATCCGCCCCCAGGCCAGCAGCCACCCC
CGCCGCAGCCTGCCAAGCCTCAGCAAGTCATCCAGCACCACCATTCACCCCGGCA
CCACAAGTCGGACCCCTACTCAACCGGTCACCTCCGCGAAGCCCCCTCCCCGCTTA
TGATACATTCCCCCCAGATGTCACAGTTCCAGAGCCTGACCCACCAGTCTCCACCC
CAGCAAAACGTCCAGCCTAAGAAACAGGAGCTGCGTGCTGCCTCCGTGGTCCAGC
CCCAGCCCCTCGTGGTGGTGAAGGAGGAGAAGATCCACTCACCCATCATCCGCAG
CGAGCCCTTCAGCCCCTCGCTGCGGCCGGAGCCCCCCAAGCACCCGGAGAGCATC
AAGGCCCCCGTCCACCTGCCCCAGCGGCCGGAAATGAAGCCTGTGGATGTCGGGA
GGCCTGTGATCCGGCCCCCAGAGCAGAACGCACCGCCACCAGGGGCCCCTGACAA
GGACAAACAGAAACAGGAGCCGAAGACTCCAGTTGCGCCCAAAAAGGACCTGAA
AATCAAGAACATGGGCTCCTGGGCCAGCCTAGTGCAGAAGCATCCGACCACCCCC
TCCTCCACAGCCAAGTCATCCAGCGACAGCTTCGAGCAGTTCCGCCGCGCCGCTCG
GGAGAAAGAGGAGCGTGAGAAGGCCCTGAAGGCTCAGGCCGAGCACGCTGAGAA
GGAGAAGGAGCGGCTGCGGCAGGAGCGCATGAGGAGCCGAGAGGACGAGGATGC
GCTGGAGCAGGCCCGGCGGGCCCATGAGGAGGCACGTCGGCGCCAGGAGCAGCA
GCAGCAGCAGCGCCAGGAGCAACAGCAGCAGCAGCAACAGCAAGCAGCTGCGGT
GGCTGCCGCCGCCACCCCACAGGCCCAGAGCTCCCAGCCCCAGTCCATGCTGGAC
CAGCAGAGGGAGTTGGCCCGGAAGCGGGAGCAGGAGCGAAGACGCCGGGAAGCC
ATGGCAGCTACCATTGACATGAATTTCCAGAGTGATCTATTGTCAATATTTGAAGA
AAATCTTTTCTGA
BRD4 Amino Acid Sequence (glutamines targeted are underlined and
bolded)
(SEQ ID NO: 375)
MSAESGPGTRLRNLPVMGDGLETSQMSTTQAQAQPQPANAASTNPPPPETSNPNKPK
RQTNQLQYLLRVVLKTLWKHQFAWPFQQPVDAVKLNLPDYYKIIKTPMDMGTIKKR
LENNYYWNAQECIQDFNTMFTNCYIYNKPGDDIVLMAEALEKLFLQKINELPTEETEI
MIVQAKGRGRGRKETGTAKPGVSTVPNTTQASTPPQTQTPQPNPPPVQATPHPFPAVT
PDLIVQTPVMTVVPPQPLQTPPPVPPQPQPPPAPAPQPVQSHPPIIAATPQPVKTKKGVK
RKADTTTPTTIDPIHEPPSLPPEPKTTKLGQRRESSRPVKPPKKDVPDSQQHPAPEKSSK
VSEQLKCCSGILKEMFAKKHAAYAWPFYKPVDVEALGLHDYCDIIKHPMDMSTIKSK
LEAREYRDAQEFGADVRLMFSNCYKYNPPDHEVVAMARKLQDVFEMRFAKMPDEPE
EPVVAVSSPAVPPPTKVVAPPSSSDSSSDSSSDSDSSTDDSEEERAQRLAELQEQLKAV
HEQLAALSQPQQNKPKKKEKDKKEKKKEKHKRKEEVEENKKSKAKEPPPKKTKKNN
SSNSNVSKKEPAPMKSKPPPTYESEEEDKCKPMSYEEKRQLSLDINKLPGEKLGRVVHI
IQSREPSLKNSNPDEIEIDFETLKPSTLRELERYVTSCLRKKRKPQAEKVDVIAGSSKMK
GFSSSESESSSESSSSDSEDSETEMAPKSKKKGHPGREQKKHHHHHHQQMQQAPAPVP
QQPPPPPQQPPPPPPPQQQQQPPPPPPPPSMPQQAAPAMKSSPPPFIATQVPVLEPQLPGS
VFDPIGHFTQPILHLPQPELPPHLPQPPEHSTPPHLNQHAVVSPPALHNALPQQPSRPSN
RAAALPPKPARPPAVSPALTQTPLLPQPPMAQPPQVLLEDEEPPAPPLTSMQMQLYLQ
QLQKVQPPTPLLPSVKVQSQPPPPLPPPPHPSVQQQLQQQPPPPPPPQPQPPPQQQHQPP
PRPVHLQPMQFSTHIQQPPPPQGQQPPHPPPGQQPPPPQPAKPQQVIQHHHSPRHHKSD
PYSTGHLREAPSPLMIHSPQMSQFQSLTHQSPPQQNVQPKKQELRAASVVQPQPLVVV
KEEKIHSPIIRSEPFSPSLRPEPPKHPESIKAPVHLPQRPEMKPVDVGRPVIRPPEQNAPPP
GAPDKDKQKQEPKTPVAPKKDLKIKNMGSWASLVQKHPTTPSSTAKSSSDSFEQFRR
AAREKEEREKALKAQAEHAEKEKERLRQERMRSREDEDALEQARRAHEEARRRQEQ
QQQQRQEQQQQQQQQAAAVAAAATPQAQSSQPQSMLDQQRELARKREQERRRREA
MAATIDMNFQSDLLSIFEENLF
PRSS2 Nucleotide Sequence
(SEQ ID NO: 376)
ATGAATCTACTTCTGATCCTTACCTTTGTTGCAGCTGCTGTTGCTGCCCCCTTTGAT
GATGATGACAAGATCGTTGGGGGCTACATCTGTGAGGAGAATTCTGTCCCCTACC
AGGTGTCCTTGAATTCTGGCTACCACTTCTGCGGTGGCTCCCTCATCAGCGAACAG
TGGGTGGTGTCAGCAGGTCACTGCTACAAGTCGGCAATTAACTCAAAATTATCAG
GAAGAGGGTGTGAATATCACCGCATCCAGGTGAGACTGGGAGAGCACAACATCG
AAGTCCTGGAGGGGAATGAATAGTTCATCAATGCGGCCAAGATCATCCGCCACCC
CAAATACAACAGCCGGACTCTGGACAATGACATCCTGCTGATCAAGCTCTCCTCAC
CTGCCGTCATCAATTCCCGCGTGTCCGCCATCTCTCTGCCCACTGCCCCTCCAGCTG
CTGGCACCGAGTCCCTCATCTCCGGCTGGGGCAACACTCTGAGTTCTGGTGCCGAC
TACCCAGACGAGCTGCAGTGCCTGGATGCTCCTGTGCTGAGCCAGGCTGAGTGTG
AAGCCTCCTACCCTGGAAAGATTACCAACAACATGTTCTGTGTGGGCTTCCTCGAG
GGAGGCAAGGATTCCTGCCAGGGTGATTCTGGTGGCCCTGTGGTCTCCAATGGAG
AGCTCCAAGGAATTGTCTCCTGGGGCTATGGCTGTGCCCAGAAGAACAGGCCTGG
AGTCTACACCAAGGTCTACAACTATGTGGACTGGATTAAGGACACCATAGCTGCC
AACAGCCATCACCACCACCATCACTAA
PSSR2 Amino Acid Sequence (glutamines targeted are underlined and
bolded)
(SEQ ID NO: 377)
MNLLLILTFVAAAVAAPFDDDDKIVGGYICEENSVPYQVSLNSGYHFCGGSLISEQWV
VSAGHCYKSAINSKLSGRGCEYHRIQVRLGEHNIEVLEGNEQFINAAKIIRHPKYNSRT
LDNDILLIKLSSPAVINSRVSAISLPTAPPAAGTESLISGWGNTLSSGADYPDELQCLDAP
VLSQAECEASYPGKITNNMFCVGFLEGGKDSCQGDSGGPVVSNGELQGIVSWGYGCA
QKNRPGVYTKVYNYVDWIKDTIAANS

### REFERENCES

[0233] 1 Edwards, H. & Schimmel, P. A bacterial amber suppressor in Saccharomyces cerevisiae is selectively recognized by a bacterial aminoacyl-tRNA synthetase. Molecular and cellular biology, doi:10.1128/MCB.10.4.1633 (1990).
[0234] 2 Edwards, H. & Trezeguet, V. An Escherichia coli tyrosine transfer RNA is a leucine-specific transfer RNA in the yeast Saccharomyces cerevisiae. PNAS, doi:10.1073/pnas.88.4.1153 (1991).
[0235] 3 Kiga, D., Sakamoto, K. & Kodama, K. Escherichia coli tyrosyl-tRNA synthetase for site-specific incorporation of an unnatural amino acid into proteins in eukaryotic translation and its application in a wheat germ cell—PNAS (2002).
[0236] 4 Dumas, A., Lercher, L., Spicer, C. D. & Davis, B. G. Designing logical codon reassignment—Expanding the chemistry in biology. Chemical Science 6, 50-69, doi:10.1039/c4sc01534g (2015).
[0237] 5 Huttlin, E. L., Ting, L., Bruckner, R. J., Gebreab, F. & Gygi, M. P. The BioPlex Network: A Systematic Exploration of the Human Interactome. Cell (2015).
[0238] 6 Bachovchin, D. A. et al. A high-throughput, multiplexed assay for superfamily-wide profiling of enzyme activity. Nature chemical biology 10, 656-663, doi:10.1038/nchembio.1578 (2014).
[0239] 7 Bachovchin, D. A., Brown, S. J., Rosen, H. & Cravatt, B. F. Identification of selective inhibitors of uncharacterized enzymes by high-throughput screening with fluorescent activity-based probes. Nature biotechnology 27, 387-394, doi:10.1038/nbt.1531 (2009).
[0240] 8 Liu, D. R., Magliery, T. J., Pastrnak, M., P. Schultz, P. G. Engineering a tRNA and aminoacyl-Trna synthetase for the site-specific incorporation of unnatural amino acids into proteins in vivo. Proceedings of the . . . (1997).
[0241] 9 Wang, L., Xie, J. & Schultz, P. G. Expanding the genetic code. Annu. Rev. Biophys. Biomol. Struct., doi:10.1146/annurev.biophys.35.101105.121507 (2006).
[0242] 10 Zhang, Z., Smith, B. A. C., Wang, L., Brock, A. & Cho, C. A new strategy for the site-specific modification of proteins in vivo. Biochemistry, doi:10.1021/bi0300231 (2003).
[0243] 11 Chin, J. W., Martin, A. B. & King, D. S. Addition of a photocrosslinking amino acid to the genetic code of Escherichia coli. Proceedings of the . . . , doi:10.1073/pnas.172226299 (2002).
[0244] 12 Chin, J. W. & Schultz, P. G. In vivo photocrosslinking with unnatural amino acid mutagenesis. Chembiochem, doi:10.1002/1439-7633(20021104)3:11<1135::AID-CBIC1135>3.0.CO;2-M (2002).
[0245] 13 Liu, W., Brock, A., Chen, S., Chen, S. & Schultz, P. G. Genetic incorporation of unnatural amino acids into proteins in mammalian cells. Nature methods (2007).
[0246] 14 Komor, A. C., Kim, Y. B., Packer, M. S., Zuris, J. A. & Liu, D. R. Programmable editing of a target base in genomic DNA without double-stranded DNA cleavage. Nature, 533(7603):420-4, doi:10.1038/nature17946 (2016).
[0247] 15 Erhart, D., Zimmermann, M., Jacques, 0. & Wittwer, M. B. Chemical development of intracellular protein heterodimerizers. Chemistry & biology (2013).
[0248] 16 Shalev, M. & Baasov, T. When proteins start to make sense: fine-tuning of aminoglycosides for PTC suppression therapy. MedChemComm 5, 1092-1105, doi:10.1039/C4MD00081A (2014).
[0249] 17 Winter, G. E. et al. DRUG DEVELOPMENT. Phthalimide conjugation as a strategy for in vivo target protein degradation. Science 348, 1376-1381, doi:10.1126/science.aab1433 (2015).
[0250] 18 Bondeson, D. P. et al. Catalytic in vivo protein knockdown by small-molecule PROTACs. Nature Chemical Biology 11, 611-617, doi:10.1038/nchembio.1858 (2015).
[0251] 19 Nishimura, K., Fukagawa, T., Takisawa, H. & Kakimoto, T. An auxin-based degron system for the rapid depletion of proteins in nonplant cells. Nature doi:10.1038/nmeth.1401 (2009).
[0252] 20 Lu, G. et al. The myeloma drug lenalidomide promotes the cereblon-dependent destruction of Ikaros proteins. Science 343, 305-309, doi:10.1126/science.1244917 (2014).
[0253] 21 Schenone, M., Schreiber, S. L., Can, S. A. & Ebert, B. L. Lenalidomide causes selective degradation of IKZF1 and IKZF3 in multiple myeloma cells. Science (2014).

### EQUIVALENTS AND SCOPE

[0254] In the claims articles such as “a,” “an,” and “the” may mean one or more than one unless indicated to the contrary or otherwise evident from the context. Claims or descriptions that include “or” between one or more members of a group are considered satisfied if one, more than one, or all of the group members are present in, employed in, or otherwise relevant to a given product or process unless indicated to the contrary or otherwise evident from the context. The disclosure includes embodiments in which exactly one member of the group is present in, employed in, or otherwise relevant to a given product or process. The disclosure includes embodiments in which more than one, or all of the group members are present in, employed in, or otherwise relevant to a given product or process.

[0255] Furthermore, the disclosure encompasses all variations, combinations, and permutations in which one or more limitations, elements, clauses, and descriptive terms from one or more of the listed claims is introduced into another claim. For example, any claim that is dependent on another claim can be modified to include one or more limitations found in any other claim that is dependent on the same base claim. Where elements are presented as lists, e.g., in Markush group format, each subgroup of the elements is also disclosed, and any element(s) can be removed from the group. It should it be understood that, in general, where the disclosure, or aspects of the disclosure, is/are referred to as comprising particular elements and/or features, certain embodiments of the disclosure or aspects of the disclosure consist, or consist essentially of, such elements and/or features. For purposes of simplicity, those embodiments have not been specifically set forth in haec verba herein.

[0256] It is also noted that the terms “comprising” and “containing” are intended to be open and permits the inclusion of additional elements or steps. Where ranges are given, endpoints are included. Furthermore, unless otherwise indicated or otherwise evident from the context and understanding of one of ordinary skill in the art, values that are expressed as ranges can assume any specific value or sub-range within the stated ranges in different embodiments of the disclosure, to the tenth of the unit of the lower limit of the range, unless the context clearly dictates otherwise.

[0257] This application refers to various issued patents, published patent applications, journal articles, and other publications, all of which are incorporated herein by reference. If there is a conflict between any of the incorporated references and the instant specification, the specification shall control. In addition, any particular embodiment of the present disclosure that falls within the prior art may be explicitly excluded from any one or more of the claims. Because such embodiments are deemed to be known to one of ordinary skill in the art, they may be excluded even if the exclusion is not set forth explicitly herein. Any particular embodiment of the disclosure can be excluded from any claim, for any reason, whether or not related to the existence of prior art.

[0258] Those skilled in the art will recognize or be able to ascertain using no more than routine experimentation many equivalents to the specific embodiments described herein. The scope of the present embodiments described herein is not intended to be limited to the above Description, but rather is as set forth in the appended claims. Those of ordinary skill in the art will appreciate that various changes and modifications to this description may be made without departing from the spirit or scope of the present disclosure, as defined in the following claims.

The application's sequence listing, which the Patent Office published only in electronic form, follows.

SEQUENCE LISTING (397 sequences)

SEQ ID NO: 1 - protein, 1368 aa, Streptococcus pyogenes [sequence omitted]

SEQ ID NO: 2 - protein, 1360 aa, Streptococcus pyogenes
MDKKYSIGLAIGTNSVGWAVITDEYKVPSKKFKVLGNTDRHSIKKNLIGALLFDSGETAEATRLKRTARRRYTRRKNRICYLQEIFSNEMAKVDDSFFHRLEESFLVEEDKKHERHPIFGNIVDEVAYHEKYPTIYHLRKKLVDSTDKADLRLIYLALAHMIKFRGHFLIEGDLNPDNSDVDKLFIQLVQTYNQLFEENPINASGVDAKAILSARLSKSRRLENLIAQLPGEKKNGLFGNLIALSLGLTPNFKSNFDLAEDAKLQLSKDTYDDDLDNLLAQIGDQYADLFLAAKNLSDAILLSDILRVNTEITKAPLSASMIKRYDEHHQDLTLLKALVRQQLPEKYKEIFFDQSKNGYAGYIDGGASQEEFYKFIKPILEKMDGTEELLVKLNREDLLRKQRTFDNGSIPHQIHLGELHAILRRQEDFYPFLKDNREKIEKILTFRIPYYVGPLARGNSRFAWMTRKSEETITPWNFEEVVDKGASAQSFIERMTNFDKNLPNEKVLPKHSLLYEYFTVYNELTKVKYVTEGMRKPAFLSGEQKKAIVDLLFKTNRKVTVKQLKEDYFKKIECFDSVEISGVEDRFNASLGTYHDLLKIIKDKDFLDNEENEDILEDIVLTLTLFEDREMIEERLKTYAHLFDDKVMKQLKRRRYTGWGRLSRKLINGIRDKQSGKTILDFLKSDGFANRNFMQLIHDDSLTFKEDIQKAQVSGQGDSLHEHIANLAGSPAIKKGILQTVKVVDELVKVMGRHKPENIVIEMARENQTTQKGQKNSRERMKRIEEGIKELGSQILKEHPVENTQLQNEKLYLYYLQNGRDMYVDQELDINRLSDYDVDAIVPQSFLKDDSIDNKVLTRSDKNRGKSDNVPSEEVVKKMKNYWRQLLNAKLITQRKFDNLTKAERGGLSELDKAGFIKRQLVETRQITKHVAQILDSRMNTKYDENDKLIREVKVITLKSKLVSDFRKDFQFYKVREINNYHHAHDAYLNAVVGTALIKKYPKLESEFVYGDYKVYDVRKMIAKSEQEIGKATAKYFFYSNIMNFFKTEITLANGEIRKRPLIETNGETGEIVWDKGRDFATVRKVLSMPQVNIVKKTEVQTGGFSKESILPKRNSDKLIARKKDWDPKKYGGFDSPTVAYSVLVVAKVEKGKSKKLKSVKELLGITIMERSSFEKNPIDFLEAKGYKEVKKDLIIKLPKYSLFELENGRKRMLASAGELQKGNELALPSKYVNFLYLASHYEKLKGSPEDNEQKQLFVEQHKHYLDEIIEQISEFSKRVILADANLDKVLSAYNKHRDKPIREQAENIIHLFTLTNLGAPAAFKYFDTTIDRKRYTSTKEVLDATLIHQSITGLYETRI

SEQ ID NO: 3 - protein, 1368 aa, Artificial Sequence
  Synthetic Polypeptide
MDKKYSIGLAIGTNSVGWAVITDEYKVPSKKFKVLGNTDRHSIKKNLIGALLFDSGETAEATRLKRTARRRYTRRKNRICYLQEIFSNEMAKVDDSFFHRLEESFLVEEDKKHERHPIFGNIVDEVAYHEKYPTIYHLRKKLVDSTDKADLRLIYLALAHMIKFRGHFLIEGDLNPDNSDVDKLFIQLVQTYNQLFEENPINASGVDAKAILSARLSKSRRLENLIAQLPGEKKNGLFGNLIALSLGLTPNFKSNFDLAEDAKLQLSKDTYDDDLDNLLAQIGDQYADLFLAAKNLSDAILLSDILRVNTEITKAPLSASMIKRYDEHHQDLTLLKALVRQQLPEKYKEIFFDQSKNGYAGYIDGGASQEEFYKFIKPILEKMDGTEELLVKLNREDLLRKQRTFDNGSIPHQIHLGELHAILRRQEDFYPFLKDNREKIEKILTFRIPYYVGPLARGNSRFAWMTRKSEETITPWNFEEVVDKGASAQSFIERMTNFDKNLPNEKVLPKHSLLYEYFTVYNELTKVKYVTEGMRKPAFLSGEQKKAIVDLLFKTNRKVTVKQLKEDYFKKIECFDSVEISGVEDRFNASLGTYHDLLKIIKDKDFLDNEENEDILEDIVLTLTLFEDREMIEERLKTYAHLFDDKVMKQLKRRRYTGWGRLSRKLINGIRDKQSGKTILDFLKSDGFANRNFMQLIHDDSLTFKEDIQKAQVSGQGDSLHEHIANLAGSPAIKKGILQTVKVVDELVKVMGRHKPENIVIEMARENQTTQKGQKNSRERMKRIEEGIKELGSQILKEHPVENTQLQNEKLYLYYLQNGRDMYVDQELDINRLSDYDVDHIVPQSFLKDDSIDNKVLTRSDKNRGKSDNVPSEEVVKKMKNYWRQLLNAKLITQRKFDNLTKAERGGLSELDKAGFIKRQLVETRQITKHVAQILDSRMNTKYDENDKLIREVKVITLKSKLVSDFRKDFQFYKVREINNYHHAHDAYLNAVVGTALIKKYPKLESEFVYGDYKVYDVRKMIAKSEQEIGKATAKYFFYSNIMNFFKTEITLANGEIRKRPLIETNGETGEIVWDKGRDFATVRKVLSMPQVNIVKKTEVQTGGFSKESILPKRNSDKLIARKKDWDPKKYGGFDSPTVAYSVLVVAKVEKGKSKKLKSVKELLGITIMERSSFEKNPIDFLEAKGYKEVKKDLIIKLPKYSLFELENGRKRMLASAGELQKGNELALPSKYVNFLYLASHYEKLKGSPEDNEQKQLFVEQHKHYLDEIIEQISEFSKRVILADANLDKVLSAYNKHRDKPIREQAENIIHLFTLTNLGAPAAFKYFDTTIDRKRYTSTKEVLDATLIHQSITGLYETRIDLSQLGGD

SEQ ID NO: 4 - DNA, 4107 bp, Streptococcus pyogenes
atggataagaaatactcaataggcttagatatcggcacaaatagcgtcggatgggcggtgatcactgatgaatataaggttccgtctaaaaagttcaaggttctgggaaatacagaccgccacagtatcaaaaaaaatcttataggggctcttttatttgacagtggagagacagcggaagcgactcgtctcaaacggacagctcgtagaaggtatacacgtcggaagaatcgtatttgttatctacaggagattttttcaaatgagatggcgaaagtagatgatagtttctttcatcgacttgaagagtcttttttggtggaagaagacaagaagcatgaacgtcatcctatttttggaaatatagtagatgaagttgcttatcatgagaaatatccaactatctatcatctgcgaaaaaaattggtagattctactgataaagcggatttgcgcttaatctatttggccttagcgcatatgattaagtttcgtggtcattttttgattgagggagatttaaatcctgataatagtgatgtggacaaactatttatccagttggtacaaacctacaatcaattatttgaagaaaaccctattaacgcaagtggagtagatgctaaagcgattctttctgcacgattgagtaaatcaagacgattagaaaatctcattgctcagctccccggtgagaagaaaaatggcttatttgggaatctcattgctttgtcattgggtttgacccctaattttaaatcaaattttgatttggcagaagatgctaaattacagctttcaaaagatacttacgatgatgatttagataatttattggcgcaaattggagatcaatatgctgatttgtttttggcagctaagaatttatcagatgctattttactttcagatatcctaagagtaaatactgaaataactaaggctcccctatcagcttcaatgattaaacgctacgatgaacatcatcaagacttgactcttttaaaagctttagttcgacaacaacttccagaaaagtataaagaaatcttttttgatcaatcaaaaaacggatatgcaggttatattgatgggggagctagccaagaagaattttataaatttatcaaaccaattttagaaaaaatggatggtactgaggaattattggtgaaactaaatcgtgaagatttgctgcgcaagcaacggacctttgacaacggctctattccccatcaaattcacttgggtgagctgcatgctattttgagaagacaagaagacttttatccatttttaaaagacaatcgtgagaagattgaaaaaatcttgacttttcgaattccttattatgttggtccattggcgcgtggcaatagtcgttttgcatggatgactcggaagtctgaagaaacaattaccccatggaattttgaagaagttgtcgataaaggtgcttcagctcaatcatttattgaacgcatgacaaactttgataaaaatcttccaaatgaaaaagtactaccaaaacatagtttgctttatgagtattttacggtttataacgaattgacaaaggtcaaatatgttactgaaggaatgcgaaaaccagcatttctttcaggtgaacagaagaaagccattgttgatttactcttcaaaacaaatcgaaaagtaaccgttaagcaattaaaagaagattatttcaaaaaaatagaatgttttgatagtgttgaaatttcaggagttgaagatagatttaatgcttcattaggtacctaccatgatttgctaaaaattattaaagataaagattttttggataatgaagaaaatgaagatatcttagaggatattgttttaacattgaccttatttgaagatagggagatgattgaggaaagacttaaaacatatgctcacctctttgatgataaggtgatgaaacagcttaaacgtcgccgttatactggttggggacgtttgtctcgaaaattgattaatggtattagggataagcaatctggcaaaacaatattagattttttgaaatcagatggttttgccaatcgcaattttatgcagctgatccatgatgatagtttgacatttaaagaagacattcaaaaagcacaagtgtctggacaaggcgatagtttacatgaacatattgcaaatttagctggtagccctgctattaaaaaaggtattttacagactgtaaaagttgttgatgaattggtcaaagtaatggggcggcataagccagaaaatatcgttattgaaatggcacgtgaaaatcagacaactcaaaagggccagaaaaattcgcgagagcgtatgaaacgaatcgaagaaggtatcaaagaattaggaagtcagattcttaaagagcatcctgttgaaaatactcaattgcaaaatgaaaagctctatctctattatctccaaaatggaagagacatgtatgtggaccaagaattagatattaatcgtttaagtgattatgatgtcgatcacattgttccacaaagtttccttaaagacgattcaatagacaataaggtcttaacgcgttctgataaaaatcgtggtaaatcggataacgttccaagtgaagaagtagtcaaaaagatgaaaaactattggagacaacttctaaacgccaagttaatcactcaacgtaagtttgataatttaacgaaagctgaacgtggaggtttgagtgaacttgataaagctggttttatcaaacgccaattggttgaaactcgccaaatcactaagcatgtggcacaaattttggatagtcgcatgaatactaaatacgatgaaaatgataaacttattcgagaggttaaagtgattaccttaaaatctaaattagtttctgacttccgaaaagatttccaattctataaagtacgtgagattaacaattaccatcatgcccatgatgcgtatctaaatgccgtcgttggaactgctttgattaagaaatatccaaaacttgaatcggagtttgtctatggtgattataaagtttatgatgttcgtaaaatgattgctaagtctgagcaagaaataggcaaagcaaccgcaaaatatttcttttactctaatatcatgaacttcttcaaaacagaaattacacttgcaaatggagagattcgcaaacgccctctaatcgaaactaatggggaaactggagaaattgtctgggataaagggcgagattttgccacagtgcgcaaagtattgtccatgccccaagtcaatattgtcaagaaaacagaagtacagacaggcggattctccaaggagtcaattttaccaaaaagaaattcggacaagcttattgctcgtaaaaaagactgggatccaaaaaaatatggtggttttgatagtccaacggtagcttattcagtcctagtggttgctaaggtggaaaaagggaaatcgaagaagttaaaatccgttaaagagttactagggatcacaattatggaaagaagttcctttgaaaaaaatccgattgactttttagaagctaaaggatataaggaagttaaaaaagacttaatcattaaactacctaaatatagtctttttgagttagaaaacggtcgtaaacggatgctggctagtgccggagaattacaaaaaggaaatgagctggctctgccaagcaaatatgtgaattttttatatttagctagtcattatgaaaagttgaagggtagtccagaagataacgaacaaaaacaattgtttgtggagcagcataagcattatttagatgagattattgagcaaatcagtgaattttctaagcgtgttattttagcagatgccaatttagataaagttcttagtgcatataacaaacatagagacaaaccaatacgtgaacaagcagaaaatattattcatttatttacgttgacgaatcttggagctcccgctgcttttaaatattttgatacaacaattgatcgtaaacgatatacgtctacaaaagaagttttagatgccactcttatccatcaatccatcactggtctttatgaaacacgcattgatttgagtcagctaggaggtgactga

SEQ ID NO: 5 - DNA, 77 bp, Artificial Sequence
  Synthetic Polynucleotide
ccggcggtagttcagcagggcagaacggcggactctaaatccgcatggcgctggttcaaatccggcccgccggacca

SEQ ID NO: 6 - DNA, 88 bp, Artificial Sequence
  Synthetic Polynucleotide
cccagggtagccaagctcggccaacggcgacggactctaaatccgttctcgtaggagttcgagggttcgaatcccttccctgggacca

SEQ ID NO: 7 - DNA, 89 bp, Artificial Sequence
  Synthetic Polynucleotide
gcgagggtagccaagctcggccaacggcgacggacttcctaatccgttctcgtaggagttcgagggttcgaatccctcccctcgcacca

SEQ ID NO: 8 - skipped

SEQ ID NO: 9 - protein, 15 aa, Artificial Sequence
  Synthetic Polypeptide
RRRRRRRRVKRKKKP

SEQ ID NO: 10 - protein, 19 aa, Artificial Sequence
  Synthetic Polypeptide
MLRAALSTARRGPRLSRLL

SEQ ID NO: 11 - protein, 1359 aa, Streptococcus pyogenes
MDKKYSIGLDIGTNSVGWAVITDEYKVPSKKFKVLGNTDRHSIKKNLIGALLFDSGETAEATRLKRTARRRYTRRKNRICYLQEIFSNEMAKVDDSFFHRLEESFLVEEDKKHERHPIFGNIVDEVAYHEKYPTIYHLRKKLVDSTDKADLRLIYLALAHMIKFRGHFLIEGDLNPDNSDVDKLFIQLVQTYNQLFEENINASGVDAKAILSARLSKSRRLENLIAQLPGEKKNGLFGNLIALSLGLTPNFKSNFDLAEDAKLQLSKDTYDDDLDNLLAQIGDQYADLFLAAKNLSDAILLSDILRVNTEITKAPLSASMIKRYDEHHQDLTLLKALVRQQLPEKYKEIFFDQSKNGYAGYIDGGASQEEFYKFIKPILEKMDGTEELLVKLNREDLLRKQRTFDNGSIPHQIHLGELHAILRRQEDFYPFLKDNREKIEKILTFRIPYYVGPLARGNSRFAWMTRKSEETITPWNFEEVVDKGASAQSFIERMTNFDKNLPNEKVLPKHSLLYEYFTVYNELTKVKYVTEGMRKPAFLSGEQKKAIVDLLFKTNRKVTVKQLKEDYFKKIECFDSVEISGVEDRFNASLGTYHDLLKIIKDKDFLDNEENEDILEDIVLTLTLFEDREMIEERLKTYAHLFDDKVMKQLKRRRYTGWGRLSRKLINGIRDKQSGKTILDFLKDGFANRNFMQLIHDDSLTFKEDIQKAQVSGQGDSLHEHIANLAGSPAIKKGILQTVKVVDELVKVMGRHKPENIVIEMARENQTTQKGQKNSRERMKRIEEGIKELGSQILKEHPVENTQLQNEKLYLYYLQNGRDMYVDQELDINRLSDYDVDHIVPQSFLKDDSIDNKVLTRSDKNRGKSDNVPSEEVVKKMKNYWRQLLNAKLITQRKFDNLTKAERGGLSELDKAGFIKRQLVETRQITKHVAQILDSRMNTKYDENDKLIREVKVITLKSKLVSDFRKDFQFYKVREINNYHHAHDAYLNAVVGTALIKKYPKLESEFVYGDYKVYDVSEQEIGKATAKYFFYSNIMNFFKTEITLANGEIRKRPLIETNGETGEIVWDKGRDFATVRKVLSMPQVNIVKKTEVQTGGFSKESILPKRNSDKLIARKKDWDPKKYGGFDSPTVAYSVLVVAKVEKGKSKKLKSVKELLGITIMERSSFEKNPIDFLEAKGYKEVKKDLIIKLPKYSLFELENGRKRMLASGELQKGNELALPSKYVNFLYLASHYEKLKGSPEDNEQKQLFVEQHKHYLDEIIEQISEFSKRVILADANLDKVLSAYNKHRDKPIREQAENIIHLFTLTNLGAPAAFKYFDTTIDRKRYTSTKEVLDATLIHQSITGLYETRIDLSQLGGD

SEQ ID NO: 12 - protein, 1355 aa, Streptococcus gallolyticus
MTKKNYSIGLDIGTNSVGWAVITDDYKVPAKKMKVLGNTDKKYIKKNLLGALLFDSGETAEATRLKRTARRRYTRRKNRLRYLQEIFANEIAKVDESFFQRLDESFLTDDDKTFDSHPIFGNKAEEDAYHQKFPTIYHLRKHLADSSEKADLRLVYLALAHMIKFRGHFLIEGELNAENTDVQKIFADFVGVYNRTFDDSHLSEITVDVASILTEKISKSRRLENLIKYYPTEKKNTLFGNLIALALGLQPNFKTNFKLSEDAKLQFSKDTYEEDLEELLGKIGDDYADLFTSAKNLYDAILLSGILTVDDNSTKAPLSASMIKRYVEHHEDLEKLKEFIKANKSELYHDIFKDKNKNGYAGYIENGVKQDEFYKYLKNILSKIKIDGSDYFLDKIEREDFLRKQRTFDNGSIPHQIHLQEMHAILRRQGDYYPFLKEKQDRIEKILTFRIPYYVGPLVRKDSRFAWAEYRSDEKITPWNFDKVIDKEKSAEKFITRMTLNDLYLPEEKVLPKHSHVYETYAVYNELTKIKYVNEQGKESFFDSNMKQEIFDHVFKENRKVTKEKLLNYLNKEFPEYRIKDLIGLDKENKSFNASLGTYHDLKKILDKAFLDDKVNEEVIEDIIKTLTLFEDKDMIHERLQKYSDIFTANQLKKLERRHYTGWGRLSYKLINGIRNKENNKTILDYLIDDGSANRNFMQLINDDTLPFKQIIQKSQVVGDVDDIEAVVHDLPGSPAIKKGILQSVKIVDELVKVMGGNPDNIVIEMARENQTTNRGRSQSQQRLKKLQNSLKPSYIEDKVENSHLQNDQLFLYYIQNGKDMYTGDELDIDHLSDYDIDHIIPQAFIKDDSIDNRVLTSSAKNRGKSDDVPSLDIVRARKAEWVRLYKSGLISKRKFDNLTKAERGGLTEADKAGFIKRQLVETRQITKHVAQILDARFNTEHDENDKVIRDVKVITLKSNLVSQFRKDFEFYKVREINDYHHAHDAYLNAVVGTALLKKYPKLASEFVYGEYKKYDISSDKATAKYFFYSNLMNFFKTKVKYADGTVFERPIIETNADGEIAWNKQIDFEKVRKVLSYPQVNIVKKVETQTGGFSKESILPKGDSDKLIPRKTKKVYWDTKKYGGFDSPTVAYSVFVVADVEKGKAKKLKTVKELVGISIMERSFFEENPVEFLENKGYHNIREDKLIKLPKYSLFEFEGGRRRLLASASELQKGNEMVLPGYLVELLYHAHRADNFNSTEYLNYVSEHKKEFEKVLSCVEDFANLYVDVEKNLSKIRAVADSMDNFSIEEISNSFINLLTLTALGAPADFNFLGEKIPRKRYTSTKECLNATLIHQSITGLYETRIDLSKLGEE

SEQ ID NO: 13 - protein, 1359 aa, Streptococcus mitis
KKGYSIGLDIGTNSVGFAVITDDYKVPSKKMKVLGNTDKRFIKKNLIGALLFDEGTTAEARRLKRTARRRYTRRKNRLRYLQEIFSEEMSKVDSSFFHRLDDSFLIPEDKRESKYPIFATLTEEKEYHKQFPTIYHLRKQLADSKEKTDLRLIYLALAHMIKYRGHFLYEEAFDIKNNDIQKIFNEFISIYDNTFEGSSLSGQNAQVEAIFTDKISKSAKRERVLKLFPDEKSTGLFSEFLKLIVGNQADFKKHFDLEDKAPLQFSKDTYDEDLENLLGQIGDDFTDLFVSAKKLYDAILLSGILTVTDPSTKAPLSASMIERYENHQNDLAALKQFIKNNLPEKYDEVFSDQSKDGYAGYIDGKTTQETFYKYIKNLLSKFEGTDYFLDKIEREDFLRKQRTFDNGSIPHQIHLQEMNAILRRQGEYYPFLKDNKEKIEKILTFRIPYYVGPLARGNRDFAWLTRNSDEAIRPWNFEEIVDKASSAEDFINKMTNYDLYLPEEKVLPKHSLLYETFAVYNELTKVKFIAEGLRDYQFLDSGQKKQIVNQLFKENRKVTEKDIIHYLHNVDGYDGIELKGIEKQFNASLSTYHDLLKIIKDKEFMDDAKNEAILENIVHTLTIFEDREMIKQRLAQYDSLFDEKVIKALTRRHYTGWGKLSAKLINGICDKQTGNTILDYLIDDGKINRNFMQLINDDGLSFKEIIQKAQVIGKTDDVKQVVQELSGSPAIKKGILQSIKIVDELVKVMGHAPESIVIEMARENQTTARGKKNSQQRYKRIEDSLKILASNILKENPTDNNQLQNDRLFLYYLQNGKDMYTGEALDINQLSSYDIDHIIPQAFIKDDSLDNRVLTSSKDNRGKSDNVPSIEVVQKRKAFWQQLLDSKLISERKFNNLTKAERGGLDERDKVGFIKRQLVETRQITKHVAQILDARYNTEVNEKDKKNRTVKIITLKSNLVSNFRKEFRLYKVREINDYHHAHDAYLNAVVAKAILKKYPKLEPEFVYGEYQKYDLSKDPKEVEKATEKYFFYSNLLNFFKEEVHYADGTIVKRENIEYSKDTGEIAWNKEKDFAIIKKVLSLPQVNIVKKREVQTGGFSKESILPKGNSDKLIPRKTKDILLDTTKYGGFDSPVIAYSILLIADIEKGKAKKLKTVKTLVGITIMEKAAFEENPITFLENKGYHNVRKENILCLPKYSLFELENGRRRLLASAKELQKGNEIVLPVYLTTLLYHSKNVHKLDEPGHLEYIQKHRNEFKDLLNLVSEFSQKYVLADANLEKIKSLYADNEQADIEILANSFINLLTFTALGAPAAFKFFGKDIDRKRYTTVSEILNATLIHQSITGLYETWIDLSKLGED

SEQ ID NO: 14 - protein, 986 aa, Staphylococcus aureus
MKRNYILGLDIGITSVGYGIIDYETRDVIDAGVRLFKEANVENNEGRRSKRGARRLKRRRRHRIQRVKKLLFDYNLLTDHSELSGNPYEARVKGLSQKLSEEEFSAALLHLAKRRGVHNVNEVEEDTGNELSTKEQISRNSKLEEKYVAELQLERLKKDGEVRGSINRKTSDYVKEAKQLLKVQKAYHQLDQSFIDTYIDLLETRRTYYEGPGEGSPFGWKDIKEWYEMLMGHCTYFPEELRSVKYAYNADLYNALNDLNNLVITRDENEKLEYYEKFQIIENVFKQKKKPTLKQIAKEILVNEEDIKGYRVTSTGKPEFTNLKVYHDIKDITARKENAELLDQIAKILTIYQSSEDIQEELTNLNSELTQEEIEQISNLKGYTGTHNLSLKAINLILDELWTNDNQIAIFNRLKLVPKKVDLSQQKEIPTTLVDDFILSPVVKRSFIQSIKVINAIIKKYGLPNDIIIELAREKNSKDAQKMINEMQKQTNEEIIRTTGKENAKYLIEKIKLHDMQEGKCLYSLEAIPLEDLLNNPFNYEVDHIIPRSVSFDNSFNNKVLVKQEEASKKGNRTPFQYLSSSDSKISYETFKKHILNLAKGKGRISKTKKEYLLEERDQKDFINRNLVDTRYATRGLMNLLRSYFRVNNLDVKVKSINGGFTSFLRRKWKFKKERNKGYKHHAEDALIIANADFIFKEWKKLDKNQMFEEKETEQEYKEIFITPHQIKHIKDFKDYKYSHRVDKKPNREVNNLNGLYDKDNDKLKKLINKSPEKLLMYHHDPQTYQKKLIMEQYGDEKNLYKYYEETGNYLTKYSKKDNGPVIKKIKYYGNKLNAHLDITDDYPNSVKLSLKPYRFDVYLDNGVYKFVTVKNLDVIKKENYYEVNSKAYEEAKKKKISNQAEFIASFYNNDLIKINGELYRVIGVNNDLLNRIEVNMIDITYREYLENMNDKRPPRIIKTIASKTQSIKKLYEVKSKKHPQIIKKG

SEQ ID NO: 15 - protein, 1044 aa, Streptococcus pyogenes
LSASMIKRYDEHHQDLTLLKALVRQQLPEKYKEIFFDQSKNGYAGYIDGGASQEEFYKFIKPILEKMDGTEELLAKLNREDLLRKQRTFDNGSIPHQIHLGELHAILRRQEDFYPFLKDNREKIEKILTFRIPYYVGPLARGNSRFAWMTRKSEETITPWNFEEVVDKGASAQSFIERMTNFDKNLPNEKVLPKHSLLYEYFTVYNELTKVKYVTEGMRKPAFLSGEQKKAIVDLLFKTNRKVTVKQLKEDYFKKIECFDSVEISGVEDRFNASLGTYHDLLKIIKDKDFLDNEENEDILEDIVLTLTLFEDREMIEERLKTYAHLFDDKVMKQLKRRRYTGWGRLSRKLINGIRDKQSGKTILDFLKDGFANRNFMQLIHDDSLTFKEDLQKAQVSGQGDSLHEHIANLAGSPAIKKGILQTVKVVDELVKVMGRHKPENIVIEMARENQTTQKGQKNSRERMKRIEEGIKELGSDILKEYPVENTQLQNEKLYLYYLQNGRDMYVDQELDINRLSDYDVDHIVPQSFLKDDSIDNKVLTRSDKNRGKSDNVPSEEVVKKMKNYWKQLLNAKLITQRKFDNLTKAERGGLSELDKAGFIKRQLVETRQITKHVAQILDSRMNTKYDENDKLIREVRVITLKSKLVSDFRKDFQFYKVREINNYHHAHDAYLNAVVGTALIKKYPKLESEFVYGDYKVYDISEQEIGKATAKYFFYSNIMNFFKTEITLANGEIRKRPLIETNGETGEIVWDKGRDFATVRKVLSMPQVNIVKKTEVQTGGFSKESILPKRNSDKLIARKKDWDPKKYGGFDSPTVAYSVLVVAKVEKGKSKKLKSVKELVGITIMERSSFEKDPVDFLEAKGYKEVRKDLIIKLPKYSLFELENGRKRMLASGELQKGNELALPSKYVNFLYLASHYEKLKGSPEDNEQKQLFVEQHKHYLDEIIEQISEFSKRVILADANLDKVLSAYNKHRDKPIREQAENIIHLFTLTNLGAPAAFKCFDTTIGRNRYKSIKEVLDATLIHQSITGLYETRIDLSQLGGD

SEQ ID NO: 16 - protein, 1359 aa, Streptococcus pyogenes; identical to SEQ ID NO: 11

SEQ ID NO: 17 - protein, 1359 aa, Streptococcus pyogenes
MDKKYSIGLDIGTNSVGWAVITDDYKVPSKKLKGLGNTDRHGIKKNLIGALLFDSGETAEATRLKRTARRRYTRRKNRICYLQEIFSNEMAKVDDSFFHRLEESFLVEEDKKHERHPIFGNIVDEVAYHEKYPTIYHLRKKLADSTDKVDLRLIYLALAHMIKFRGHFLIEGDLNPDNSDVDKLFIQLVQTYNQLFEENINASRVDAKAILSARLSKSRRLENLIAQLPGEKKNGLFGNLIALSLGLTPNFKSNFDLAEDAKLQLSKDTYDDDLDNLLAQIGDQYADLFLAAKNLSDATLLSDILRVNSEITKAPLSASMIKRYDEHHQDLTLLKALVRQQLPEKYKEIFFDQSKNGYAGYIDGGASQEEFYKFIKPILEKMDGTEELLAKLNREDLLRKQRTFDNGSIPYQIHLGELHAILRRQEDFYPFLKDNREKIEKILTFRIPYYVGPLARGNSRFAWMTRKSEETITPWNFEEVVDKGASAQSFIERMTNFDKNLPNEKVLPKHSLLYEYFTVYNELTKVKYVTEGMRKPAFLSGEQKKAIVDLLFKTNRKVTVKQLKEDYFKKIECFDSVEISGVEDRFNASLGTYHDLLKIIKDKDFLDNEENEDILEDIVLTLTLFEDREMIEERLKTYAHLFDDKVMKQLKRRRYTGWGRLSRKLINGIRDKQSGKTILDFLKDGFANRNFMQLIHDDSLTFKEDIQKAQVSGQGDSLHEHIANLAGSPAIKKGILQTVKVVDELVKVMGRHKPENIVIEMARENQTTQKGQKNSRERMKRIEEGIKELGSDILKEYPVENTQLQNEKLYLYYLQNGRDMYVDQELDINRLSDYDVDHIVPQSFLKDDSIDNKVLTRSDKNRGKSDNVPSEEVVKKMKNYWRQLLNAKLITQRKFDNLTKAERGGLSELDKVGFIKRQLVETRQITKHVAQILDSRMNTKYDENDKLIREVRVITLKSKLVSDFRKDFQFYKVREINNYHHAHDAYLNAVVGTALIKKYPKLESEFVYGDYKVYDVSEQEIGKATAKYFFYSNIMNFFKTEITLANGEIRKRPLIETNGETGEIVWDKGRDFATVRKVLSMPQVNIVKKTEVQTGGFSKESILPKRNSDKLIARKKDWDPKKYGGFDSPTVAYSVLVVAKVEKGKSKKLKSVKELLGITIMERSSFEKDPIDFLEAKGYKEVRKDLIIKLPKYSLFELENGRKRMLASGELQKGNELALPSKYVNFLYLASHYEKLKGSPEDNEQKQLFVEQHKHYLDEIIEQISEFSKRVILADANLDKVLSAYNKHRDKPIREQAENIIHLFTLTNLGAPAAFKYFDTTIDRKRYTSTKEVLDATLIHQSITGLYETRIDLSQLGGD

SEQ ID NO: 18 - protein, 1359 aa, Streptococcus pyogenes
MDKKYSIGLDIGTNSVGWAVITDDYKVPSKKFKVLGNTDRHSIKKNLIGALLFDSGETAEATRLKRTARRRYTRRKNRICYLQEIFSNEMAKVDDSFFHRLEESFLVEEDKKHERHPIFGNIVDEVAYHEKYPTIYHLRKKLVDSTDKADLRLIYLALAHMIKFRGHFLIEGDLNPDNSDVDKLFIQLVQTYNQLFEENINASGVDAKAILSARLSKSRRLENLIAQLPGEKKNGLFGNLIALSLGLTPNFKSNFDLAEDAKLQLSKDTYDDDLDNLLAQIGDQYADLFLAAKNLSDAILLSDILRLNSEITKAPLSASMIKRYDEHHQDLTLLKALVRQQLPEKYKEIFFDQSKNGYAGYIDGGASQEEFYKFIKPILEKMDGTEELLAKLNREDLLRKQRTFDNGSIPHQIHLGELHAILRRQEDFYPFLKDNREKIEKILTFRIPYYVGPLARGNSRFAWMTRKSEETITPWNFEEVVDKGASAQSFIERMTNFDKNLPNEKVLPKHSLLYEYFTVYNELTKVKYVTEGMRKPAFLSGEQKKAIVDLLFKTNRKVTVKQLKEDYFKKIECFDSVEISGVEDRFNASLGTYHDLLKIIKDKDFLDNEENEDILEDIVLTLTLFEDREMIEERLKTYAHLFDDKVMKQLKRRRYTGWGRLSRKLINGIRDKQSGKTILDFLKDGFANRNFMQLIHDDSLTFKEDIQKAQVSGQGDSLHEHIANLAGSPAIKKGILQTVKVVDELVKVMGRHKPENIVIEMARENQTTQKGQKNSRERMKRIEEGIKELGSQILKEHPVENTQLQNEKLYLYYLQNGRDMYVDQELDINRLSDYDVDHIVPQSFIKDDSIDNKVLTRSDKNRGKSNNVPSEEVVKKMKNYWRQLLNAKLITQRKFDNLTKAERGGLSELDKAGFIKRQLVETRQITKHVAQILDSRMNTKYDENDKLIREVKVITLKSKLVSDFRKDFQFYKVREINNYHHAHDAYLNAVVGTALIKKYPKLESEFVYGDYKVYDVSEQEIGKATAKYFFYSNIMNFFKTEITLANGEIRKRPLIETNGETGEIVWDKGRDFATVRKVLSMPQVNIVKKTEVQTGGFSKESILPKRNSDKLIARKKDWDPKKYGGFDSPTVAYSVLVVAKVEKGKSKKLKSVKELLGITIMERSSFEKNPIDFLEAKGYKEVRKDLIVKLPKYSLFELENGRKRMLASGELQKGNELALPSKYVNFLYLASHYEKLKGSPEDNEQKQLFVEQHKHYLDEIIEQISEFSKRVILADANLDKVLSAYNKHRDKPIREQAENIIHLFTLTNLGAPAAFKYFDTTIDRKRYTSTKEVLDATFIHQSITGLYETRIDLSQLGGD

SEQ ID NO: 19 - protein, 1359 aa, Streptococcus pyogenes
MDKKYSIGLDIGTNSVGWAVITDDYKVPSKKFKVLGNTDRHSIKKNLIGALLFDSGETAEATRLKRTARRRYTRRKNRICYLQEIFSNEMAKVDDSFFHRLEESFLVEEDKKHERHPIFGNIVDEVAYHEKYPTIYHLRKKLVDSTDKADLRLIYLALAHMIKFRGHFLIEGDLNPDNSDVDKLFIQLVQTYNQLFEENINASGVDAKAILSARLSKSRRLENLIAQLPGEKKNGLFGNLIALSLGLTPNFKSNFDLAEDAKLQLSKDTYDDDLDNLLAQIGDQYADLFLAAKNLSDAILLSDILRVNTEITKAPLSASMIKRYDEHHQDLTLLKALVRQQLPEKYKEIFFDQSKNGYAGYIDGGASQEEFYKFIKPILEKMDGTEELLVKLNREDLLRKQRTFDNGSIPHQIHLGELHAILRRQEDFYPFLKDNREKIEKILTFRIPYYVGPLARGNSRFAWMTRKSEETITPWNFEEVVDKGASAQSFIERMTNFDKNLPNEKVLPKHSLLYEYFTVYNELTKVKYVTEGMRKPAFLSGEQKKAIVDLLFKTNRKVTVKQLKEDYFKKIECFDSVEISGVEDRFNASLGTYHDLLKIIKDKDFLDNEENEDILEDIVLTLTLFEDREMIEERLKTYAHLFDDKVMKQLKRRRYTGWGRLSRKLINGIRDKQSGKTILDFLKDGFANRNFMQLIHDDSLTFKEDIQKAQVSGQGDSLHEHIANLAGSPAIKKGILQTVKVVDELVKVMGRHKPENIVIEMARENQTTQKGQKNSRERMKRIEEGIKELGSQILKEHPVENTQLQNEKLYLYYLQNGRDMYVDQELDINRLSDYDVDHIVPQSFLKDDSIDNKVLTRSDKNRGKSDNVPSEEVVKKMKNYWRQLLNAKLITQRKFDNLTKAERGGLSELDKAGFIKRQLVETRQITKHVAQILDSRMNTKYDENDKLIREVKVITLKSKLVSDFRKDFQFYKVREINNYHHAHDAYLNAVVGTALIKKYPKLESEFVYGDYKVYDVSEQEIGKATAKYFFYSNIMNFFKTEITLANGEIRKRPLIETNGETGEIVWDKGRDFATVRKVLSMPQVNIVKKTEVQTGGFSKESILPKRNSDKLIARKKDWDPKKYGGFDSPTVAYSVLVVAKVEKGKSKKLKSVKELLGITIMERSSFEKNPIDFLEAKGYKEVKKDLIIKLPKYSLFELENGRKRMLASGELQKGNELALPSKYVNFLYLASHYEKLKGSPEDNEQKQLFVEQHKHYLDEIIEQISEFSKRVILADANLDKVLSAYNKHRDKPIREQAENIIHLFTLTNLGAPAAFKYFDTTIDRKRYTSTKEVLDATLIHQSITGLYETRIDLSQLGGD

SEQ ID NO: 20 - protein, 1359 aa, Streptococcus pyogenes
MDKKYSIGLDIGTNSVGWAVITDDYKVPSKKFKVLGNTDRHSIKKNLIGALLFDSGEIAEATRLKRTARRRYTRRKNRICYLQEIFSNEMAKVDDSFFHRLEESFLVEEDKKHERHPIFGNIVDEVAYHEKYPTIYHLRKKLVDSTDKADLRLIYLALAHMIKFRGHFLIEGDLNPDNSDVDKLFIQLVQTYNQLFEENINASGVDAKAILSARLSKSRRLENLIAQLPGEKKNGLFGNLIALSLGLTPNFKSNFDLAEDAKLQLSKDTYDDDLDNLLAQIGDQYADLFLAAKNLSDAILLSDILRLNSEITKAPLSASMIKRYDEHHQDLTLLKALVRQQLPEKYKEIFFDQSKNGYAGYIDGGASQEEFYKFIKPILEKMDGTEELLAKLNREDLLRKQRTFDNGSIPHQIHLGELHAILRRQEDFYPFLKDNREKIEKILTFRIPYYVGPLARGNSRFAWMTRKSEETITPWNFEEVVDKGASAQSFIERMTNFDKNLPNEKVLPKHSLLYEYFTVYNELTKVKYVTEGMRKPAFLSGEQKKAIVDLLFKTNRKVTVKQLKEDYFKKIECFDSVEISGVEDRFNASLGTYHDLLKIIKDKDFLDNEENEDILEDIVLTLTLFEDREMIEERLKTYAHLFDDKVMKQLKRRRYTVWGRLSRKLINGIRDKQSGKTILDFLKDGFANRNFMQLIHDDSLTFKEDIQKAQVSGQGDSLHEHIANLAGSPAIKKGILQTVKVVDELVKVMGRHKPENIVIEMARENQTTQKGQKNSRERMKRIEEGIKELGSQILKEHPVENTQLQNEKLYLYYLQNGRDMYVDQELDINRLSDYDVDHIVPQSFIKDDSIDNKVLTRSDKNRGKSDNVPSEEVVKKMKNYWRQLLNAKLITQRKFDNLTKAERGGLSELDKAGFIKRQLVETRQITKHVAQILDSRMNTKYDENDKLIREVKVITLKSKLVSDFRKDFQFYKVREINNYHHAHDAYLNAVVGTALIKKYPKLESEFVYGDYKVYDVSEQEIGKATAKYFFYSNIMNFFKTEITLANGEIRKRPLIETNGETGEIVWDKGRDFATVRKVLSMPQVNIVKKTEVQTGGFSKESILPKRNSDKLIARKKDWDPKKYGGFDSPTVAYSVLVVAKVEKGKSKKLKSVKELLGITIMERSSFEKNPIDFLEAKGYKEVRKDLIIKLPKYSLFELENGRKRMLASGELQKGNELALPSKYVNFLYLASHYEKLKGSPEDNEQKQLFVEQHKHYLDEIIEQISEFSKRVILADANLDKVLSAYNKHRDKPIREQAENIIHLFTLTNLGAPTAFKYFDTTIDRKRYTSTKEVLDATFIHQSITGLYETRIDLSQLGGD

SEQ ID NO: 21 - protein, 1359 aa, Streptococcus pyogenes
MDKKYSIGLDIGTNSVGWAVITDDYKVPSKKFKVLGNTDRHSIKKNLIGALLFDSGETAEATRLKRTARRRYTRRKNRICYLQEIFSNEIAKVDDSFFHRLEESFLVEEDKKHERHPIFGNIVDEVAYHEKYPTIYHLRKKLADSTDKADLRLIYLALAHMIKFRGHFLIEGDLNPDNSDVDKLFIQLVQTYNQLFEENINASRVDAKAILSARLSKSRRLENLIAQLPGEKRNGLFGNLIALSLGLTPNFKSNFDLAEDAKLQLSKDTYDDDLDNLLAQIGDQYADLFLAAKNLSDAILLSDILRVNTEITKAPLSASMIKRYDEHHQDLTLLKALVRQQLPEKYKEIFFDQSKNGYAGYIDGGASQEEFYKFIKPILEKMDGTEELLAKLNREDLLRKQRTFDNGSIPHQIHLGELHAILRRQEDFYPFLKDNREKIEKILTFRIPYYVGPLARGNSRFAWMTRKSEETITPWNFEEVVDKGASAQSFIERMTNFDKNLPNEKVLPKHSLLYEYFTVYNELTKVKYVTEGMRKPAFLSGEQKKAIVDLLFKTNRKVTVKQLKEDYFKKIECFDSVEISGVEDRFNASLGTYHDLLKIIKDKDFLDNEENEDILEDIVLTLTLFEDREMIEERLKTYAHLFDDKVMKQLKRRRYTGWGRLSRKLINGIRDKQSGKTILDFLKDGFANRNFMQLIHDDSLTFKEDLQKAQVSGQGDSLHEHIANLAGSPAIKKGILQTVKVVDELVKVMGRHKPENIVIEMARENQTTQKGQKNSRERMKRIEEGIKELGSDILKEYPVETTQLQNEKLYLYYLQNGRDMYVDQELDINRLSDYDVDHIVPQSFLKDDSIDNKVLTRSDKNRGKSDNVPSEEVVKKMKNYWKQLLNAKLITQRKFDNLTKAERGGLSELDKAGFIKRQLVETRQITKHVAQILDSRMNTKYDENDKLIREVRVITLKSKLVSDFRKDFQFYKVREINNYHHAHDAYLNAVVGTALIKKYPKLESEFVYGDYKVYDISEQEIGKATAKYFFYSNIMNFFKTEITLANGEIRKRPLIETNGETGEIVWDKGRDFATVRKVLSMPQVNIVKKTEVQTGGFSKESILPKRNSDKLIARKKDWDPKKYGGFDSPTVAYSVLVVAKVEKGKSKKLKSVKELVGITIMERSSFEKDPVDFLEAKGYKEVRKDLIIKLPKYSLFELENGRKRMLASGELQKGNELALPSKYVNFLYLASHYEKLKGSPEDNEQKQLFVEQHKHYLDEIIEQISEFSKRVILADANLDKVLSAYNKHRDKPIREQAENIIHLFTLTNLGAPAAFKCFDTTIGRNRYKSIKEVLDATLIHQSITGLYETRIDLSQLGGD

SEQ ID NO: 22 - protein, 1358 aa, Streptococcus pyogenes
MDKKYSIGLDIGTNSVGWAVITDDYKVPSKKFKVLGNTDRHSIKKNLIGALLFGSGETAEATRLKRTARRRYTRRKNRICYLQEIFSNEMAKVDDSFFHRLEESFLVEEDKKHERHPIFGNIVDEVAYHEKYPTIYHLRKKLADSTDKADLRLIYLALAHMIKFRGHFLIEGDLNPDNSDVDKLFIQLVQIYNQLFEENINASRVDAKAILSARLSKSRRLENLIAQLPGEKRNGLFGNLIALSLGLTPNFKSNFDLAEDAKLQLSKDTYDDDLDNLLAQIGDQYADLFLAAKNLSDAILLSDILRVNSEITKAPLSASMIKRYDEHHQDLTLLKALVRQQLPEKYKEIFFDQSKNGYAGYIDGGASQEEFYKFIKPILEKMDGTEELLVKLNREDLLRKQRTFDNGSIPHQIHLGELHAILRRQEDFYPFLKDNREKIEKILTFRIPYYVGPLARGNSRFAWMTRKSEETITPWNFEEVVDKGASAQSFIERMTNFDKNLPNEKVLPKHSLLYEYFTVYNELTKVKYVTEGMRKPAFLSGEQKKAIVDLLFKTNRKVTVKQLKEDYFKKIECFDSVEISGVEDRFNASLGAYHDLLKIIKDKDFLDNEENEDILEDIVLTLTLFEDRGMIEERLKTYAHLFDDKVMKQLKRRRYTGWGRLSRKLINGIRDKQSGKTILDFLKDGFANRNFMQLIHDDSLTFKEDIQKAQVSGQGHSLHEQIANLAGSPAIKKGILQTVKIVDELVKVMGHKPENIVIEMARENQTTQKGQKNSRERMKRIEEGIKELGSQILKEHPVENTQLQNEKLYLYYLQNGRDMYVDQELDINRLSDYDVDHIVPQSFIKDDSIDNKVLTRSDKNRGKSDNVPSEEVVKKMKNYWRQLLNAKLITQRKFDNLTKAERGGLSELDKAGFIKRQLVETRQITKHVAQILDSRMNTKYDENDKLIREVKVITLKSKLVSDFRKDFQFYKVREINNYHHAHDAYLNAVVGTALIKKYPKLESEFVYGDYKVYDVSEQEIGKATAKYFFYSNIMNFFKTEITLANGEIRKRPLIETNGETGEIVWDKGRDFATVRKVLSMPQVNIVKKTEVQTGGFSKESILPKRNSDKLIARKKDWDPKKYGGFDSPTVAYSVLVVAKVEKGKSKKLKSVKELLGITIMERSSFEKNPIDFLEAKGYKEVKKDLIIKLPKYSLFELENGRKRMLASGELQKGNELALPSKYVNFLYLASHYEKLKGSPEDNEQKQLFVEQHKHYLDEIIEQISEFSKRVILADANLDKVLSAYNKHRDKPIREQAENIIHLFTLTNLGAPAAFKYFDTTIDRKRYTSTKEVLDATLIHQSITGLYETRIDLSQLGGD

SEQ ID NO: 23 - protein, 1359 aa, Streptococcus pyogenes
MDKKYSIGLDIGTNSVGWAVITDDYKVPSKKFKVLGNTDRHSIKKNLIGALLFDSGETAEATRLKRTARRRYTRRKNRICYLQEIFSNEMAKVDDSFFHRLEESFLVEEDKKHERHPIFGNIVDEVAYHEKYPTIYHLRKKLVDSTDKADLRLIYLALAHMIKFRGHFLIEGDLNPDNSDVDKLFIQLVQTYNQLFEENINASGVDAKAILSARLSKSRRLENLIAQLPGEKKNGLFGNLIALSLGLTPNFKSNFDLAEDAKLQLSKDTYDDDLDNLLAQIGDQYADLFLAAKNLSDAILLSDILRLNSEITKAPLSASMIKRYDEHHQDLTLLKALVRQQLPEKYKEIFFDQSKNGYAGYIDGGASQEEFYKFIKPILEKMDGTEELLAKLNREDLLRKQRTFDNGSIPHQIHLGELHAILRRQEDFYPFLKDNREKIEKILTFRIPYYVGPLARGNSRFAWMTRKSEETITPWNFEEVVDKGASAQSFIERMTNFDKNLPNEKVLPKHSLLYEYFTVYNELTKVKYVTEGMRKPAFLSGEQKKAIVDLLFKTNRKVTVKQLKEDYFKKIECFDSVEISGVEDRFNASLGTYHDLLKIIKDKDFLDNEENEDILEDIVLTLTLFEDREMIEERLKTYAHLFDDKVMKQLKRRRYTGWGRLSRKLINGIRDKQSGKTILDFLKDGFANRNFMQLIHDDSLTFKEDIQKAQVSGQGDSLHEHIANLAGSPAIKKGILQTVKVVDELVKVMGRHKPENIVIEMARENQTTQKGQKNSRERMKRIEEGIKELGSQILKEHPVENTQLQNEKLYLYYLQNGRDMYVDQELDINRLSDYDVDHIVPQSFIKDDSIDNKVLTRSDKNRGKSDNVPSEEVVKKMKNYWRQLLNAKLITQRKFDNLTKAERGGLSELDKAGFIKRQLVETRQITKHVAQILDSRMNTKYDENDKLIREVKVITLKSKLVSDFRKDFQFYKVREINNYHHAHDAYLNAVVGTALIKKYPKLESEFVYGDYKVYDVSEQEIGKATAKYFFYSNIMNFFKTEITLANGEIRKRPLIETNGETGEIVWDKGRDFATVRKVLSMPQVNIVKKTEVQTGGFSKESILPKRNSDKLIARKKDWDPKKYGGFDSPTVAYSVLVVAKVEKGKSKKLKSVKELLGLTIMERSSFEKNPIDFLEAKGYKEVKKDLIIKLPKYSLFELENGRKRMLASGELQKGNELALPSKYVNFLYLASHYEKLKGSPEDNEQKQLFVEQHKHYLDEIIEQISEFSKRVILADANLDKVLSAYNKHRDKPIREQAENIIHLFTLTNLGAPAAFKYFDTTIDRKRYTSTKEVLDATLIHQSITGLYETRIDLSQLGGD

SEQ ID NO: 24 - protein, 1358 aa, Streptococcus pyogenes
MDKKYSIGLDIGTNSVGWAVITDDYKVPSKKLKVLGNTDRHGIKKNLIGALLFDSGETAEATRLKRTARRRYTRRKNRICYLQEIFSNEMAKVDDSFFHRLEESFLVEEDKKHERHPIFGNIVDEVAYHEKYPTIYHLRKKLADSTDKVDLRLIYLALAHMIKFRGHFLIEGDLNPDNSDVDKLFIQLVQTYNQLFEENINASRVDAKAILSARLSKSRRLENLIAQLPGEKKNGLFGNLIALSLGLTPNFKSNFDLAEDAKLQLSKDTYDDDLDNLLAQIGDQYADLFLAAKNLSDAILLSDILRVNSEITKAPLSASMIKRYDEHHQDLTLLKALVRQQLPEKYKEIFFDQSKNGYAGYIDGGASQEEFYKFIKPILEKMDGTEELLAKLNREDLLRKQRTFDNGSIPYQIHLGELHAILRRQEDFYPFLKDNREKIEKILTFRIPYYVGPLARGNSRFAWMTRKSEETITPWNFEEVVDKGASAQSFIERMTNFDKNLPNEKVLPKHSLLYEYFTVYNELTKVKYVTEGMRKPAFLSGEQKKAIVDLLFKTNRKVTVKQLKEDYFKKIECFDSVEISGVEDRFNTSLGTYHDLLKIIKDKDFLDNEENEDILEDIVLTLTLFEDKEMIEERLKKYANLFDDKVMKQLKRRHYTGWGRLSRKLINGIRDKQSGKTILDFLKDGFANRNFMQLINDDSLTFKEAIQKAQVSGQGHSLHEQIANLAGSPAIKKGILQTVKIVDELVKVMGHKPENIVIEMARENQTTQKGQKNSRERMKRIEEGIKELGSQILKEHPVENTQLQNEKLYLYYLQNGRDMYVDQELDINRLSDYDVDHIVPQSFLKDDSIDNKVLTRSDKNRGKSDNVPSEEVVKKMKNYWRQLLNAKLITQRKFDNLTKAERGGLSELDKAGFIKRQLVETRQITKHVAQILDSRMNTKYDENDKLIREVKVITLKSKLVSDFRKDFQFYKVREINNYHHAHDAYLNAVVGTALIKKYPKLESEFVYGDYKVYDVSEQEIGKATAKYFFYSNIMNFFKTEITLANGEIRKRPLIETNGETGEIVWDKGRDFATVRKVLSMPQVNIVKKTEVQTGGFSKESILPKRNSDKLIARKKDWDPKKYGGFDSPTVAYSVLVVAKVEKGKSKKLKSVKELLGITIMERSSFEKNPIDFLEAKGYKEVRKDLIIKLPKYSLFELENGRKRMLASGELQKGNELALPSKYVNFLYLASHYEKLKGSPEDNEQKQLFVEQHKHYLDEIIEQISEFSKRVILADANLDKVLSAYNKHRDKPIREQAKNIIHLFTLTNLGAPAAFKYFDTTIERNRYKSIKEVLDATLIHQSITGLYETRIDLSQLGGD

SEQ ID NO: 25 - protein, 1358 aa, Streptococcus pyogenes
MDKKYSIGLDIGTNSVGWAVITDDYKVPSKKLKVLGNTDRHGIKKNLIGALLFDSGETAEATRLKRTARRRYTRRKNRICYLQEIFSNEMAKVDDSFFHRLEESFLVEEDKKHERHPIFGNIVDEVAYHEKYPTIYHLRKKLADSTDKVDLRLIYLALAHMIKFRGHFLIEGDLNPDNSDVDKLFIQLVQTYNQLFEENINASRVDAKAILSARLSKSRRLENLIAQLPGEKKNGLFGNLIALSLGLTPNFKSNFDLAEDAKLQLSKDTYDDDLDNLLAQIGDQYADLFLAAKNLSDAILLSDILRVNSEITKAPLSASMIKRYDEHHQDLTLLKALVRQQLPEKYKEIFFDQSKNGYAGYIDGGASQEEFYKFIKPILEKMDGTEELLAKLNREDLLRKQRTFDNGSIPYQIHLGELHAILRRQEDFYPFLKDNREKIEKILTFRIPYYVGPLARGNSRFAWMTRKSEETITPWNFEEVVDKGASAQSFIERMTNFDKNLPNEKVLPKHSLLYEYFTVYNELTKVKYVTEGMRKPAFLSGEQKKAIVDLLFKTNRKVTVKQLKEDYFKKIECFDSVEISGVEDRFNTSLGTYHDLLKIIKDKDFLDNEENEDILEDIVLTLTLFEDKEMIEERLKKYANLFDDKVMKQLKRRHYTGWGRLSRKLINGIRDKQSGKTILDFLKDGFANRNFMQLINDDSLTFKEAIQKAQVSGQGHSLHEQIANLAGSPAIKKGILQTVKIVDELVKVMGHKPENIVIEMARENQTTQKGQKNSRERMKRIEEGIKELGSQILKEHPVENTQLQNEKLYLYYLQNGRDMYVDQELDINRLSDYDVDHIVPQSFLKDDSIDNKVLTRSDKNRGKSDNVPSEEVVKKMKNYWRQLLNAKLITQRKFDNLTKAERGGLSELDKAGFIKRQLVETRQITKHVAQILDSRMNTKYDENDKLIREVKVITLKSKLVSDFRKDFQFYKVREINNYHHAHDAYLNAVVGTALIKKYPKLESEFVYGDYKVYDVSEQEIGKATAKYFFYSNIMNFFKTEITLANGEIRKRPLIETNGETGEIVWDKGRDFATVRKVLSMPQVNIVKKTEVQTGGFSKESILPKRNSDKLIARKKDWDPKKYGGFDSPTVAYSVLVVAKVEKGKSKKLKSVKELLGITIMERSSFEKNPIDFLEAKGYKEVRKDLIIKLPKYSLFELENGRKRMLASGELQKGNELALPSKYVNFLYLASHYEKLKGSPEDNEQKQLFVEQHKHYLDEIIEQISEFSKRVILADANLDKVLSAYNKHRDKPIREQAKNIIHLFTLTNLGAPAAFKYFDTTIERNRYKSIKEVLDATLIHQSITGLYEIRIDLSQLGGD

SEQ ID NO: 26 - protein, 1359 aa, Streptococcus pyogenes
MDKKYSIGLDIGTNSVGWAVITDDYKVPSKKFKVLGNTDRHSIKKNLIGALLFDSGETAEATRLKRTARRRYTRRKNRICYLQEIFSNEMAKVDDSFFHRLEESFLVEEDKKHERHPIFGNIVDEVAYHEKYPTIYHLRKKLVDSTDKADLRLIYLALAHMIKFRGHFLIEGDLNPDNSDVDKLFIQLVQTYNQLFEENINASGVDAKAILSARLSKSRRLENLIAQLPGEKKNGLFGNLIALSLGLTPNFKSNFDLAEDAKLQLSKDTYDDDLDNLLAQIGDQYADLFLAAKNLSDAILLSDILRVNTEITKASLSASMIKRYDEHHQDLTLLKALVRQQLPEKYKEIFFDQSKNGYAGYIDGGASQEEFYKFIKPILEKMDGTEELLVKLNREDLLRKQRTFDNGSIPHQIHLGELHAILRRQEDFYPFLKDNREKIEKILTFRIPYYVGPLARGNSRFAWMTRKSEETITPWNFEEVVDKGASAQSFIERMTNFDKNLPNEKVLPKHSLLYEYFTVYNELTKVKYVTEGMRKPAFLSGEQKKAIVDLLFKTNRKVTVKQLKEDYFKKIECFDSVEISGVEDRFNASLGTYHDLLKIIKDKDFLDNEENEDILEDIVLTLTLFEDREMIEERLKTYAHLFDDKVMKQLKRRRYTGWGRLSRKLINGIRDKQSGKTILDFLKDGFANRNFMQLIHDDSLTFKEDLQKAQVSGQGDSLHEHIANLAGSPAIKKGILQTVKVVDELVKVMGRHKPENIVIEMARENQTTQKGQKNSRERMKRIEEGIKELGSDILKEYPVENTQLQNEKLYLYYLQNGRDMYVDQELDINRLSDYDVDHIVPQSFIKDDSIDNKVLTRSDKNRGKSDNVPSEEVVKKMKNYWRQLLNAKLITQRKFDNLTKAERGGLSELDKAGFIKRQLVETRQITKHVAQILDSRMNTKYDENDKLIREVKVITLKSKLVSDFRKDFQFYKVREINNYHHAHDAYLNAVVGTALIKKYPKLESEFVYGDYKVYDVSEQEIGKATAKYFFYSNIMNFFKTEITLANGEIRKRPLIETNGETGEIVWDKGRDFATVRKVLSMPQVNIVKKTEVQTGGFSKESILPKRNSDKLIARKKDWDPKKYGGFDSPTVAYSVLVVAKVEKGKSKKLKSVKELLGITIMERSSFEKNPIDFLEAKGYKEVRKDLIIKLPKYSLFELENGRKRMLASGELQKGNELALPSKYVNFLYLASHYEKLKGSPEDNEQKQLFVEQHKHYLDEIIEQISEFSKRVILADANLDKVLSAYNKHRDKPIREQAENIIHLFTLTNLGAPAAFKYFDTTIGRNRYKSIKEVLDATLIHQSITGLYETRIDLSQLGGD

SEQ ID NO: 27 - protein, 1359 aa, Streptococcus pyogenes
MDKKYSIGLDIGTNSVGWAVITDDYKVPSKKFKVLGNTDRHGIKKNLIGALLFDSGETAEATRLKRTARRRYTRRKNRICYLQEIFSNEMAKVDDSFFHRLEESFLVEEDKKHERHPIFGNIVDEVAYHEKYPTIYHLRKKLADSTDKVDLRLIYLALAHMIKFRGHFLIEGDLNPDNSDVDKLFIQLVQTYNQLFEENINASRVDAKAILSARLSKSRRLENLIAQLPGEKKNGLFGNLIALSLGLTPNFKSNFDLAEDAKLQLSKDTYDDDLDNLLAQIGDQYADLFLAAKNLSDATLLSDILRVNSEITKAPLSASMIKRYDEHHQDLTLLKALVRQQLPEKYKEIFFDQSKNGYAGYIDGGASQEEFYKFIKPILEKMDGTEELLAKLNREDLLRKQRTFDNGSIPYQIHLGELHAILRRQEDFYPFLKDNREKIEKILTFRIPYYVGPLARGNSRFAWMTRKSEETITPWNFEEVVDKGASAQSFIERMTNFDKNLPNEKVLPKHSLLYEYFTVYNELTKVKYVTEGMRKPAFLSGEQKKAIVDLLFKTNRKVTVKQLKEDYFKKIECFDSVEISGVEDRFNASLGTYHDLLKIIKDKDFLDNEENEDILEDIVLTLTLFEDREMIEERLKTYAHLFDDKVMKQLKRRRYTGWGRLSRKLINGIRDKQSGKTILDFLKDGFANRNFMQLIHDDSLTFKEDIQKAQVSGQGDSLHEHIANLAGSPAIKKGILQTVKVVDELVKVMGRHKPENIVIEMARENQTTQKGQKNSRERMKRIEEGIKELGSDILKEYPVENTQLQNEKLYLYYLQNGRDMYVDQELDINRLSDYDVDHIVPQSFLKDDSIDNKVLTRSDKNRGKSDNVPSEEVVKKMKNYWRQLLNAKLITQRKFDNLTKAERGGLSELDKAGFIKRQLVETRQITKHVAQILDSRMNTKYDENDKLIREVKVITLKSKLVSDFRKDFQFYKVREINNYHHAHDAYLNAVVGTALIKKYPKLESEFVYGDYKVYDVSEQEIGKATAKYFFYSNIMNFFKTEITLANGEIRKRPLIETNGETGEIVWDKGRDFATVRKVLSMPQVNIVKKTEVQTGGFSKESILPKRNSDKLIARKKDWDPKKYGGFDSPTVAYSVLVVAKVEKGKSKKLKSVKELLGITIMERSSFEKNPIDFLEAKGYKEVRKDLIIKLPKYSLFELENGRKRMLASGELQKGNELALPSKYVNFLYLASHYEKLKGSPEDNEQKQLFVEQHKHYLDEIIEQISEFSKRVILADANLDKVLSAYNKHRDKPIREQAENIIHLFTLTNLGAPAAFKYFDTTIDRKRYTSTKEVLDATLIHQSITGLYETRIDLSQLGGD

SEQ ID NO: 28 - protein, 1359 aa, Streptococcus pyogenes
MDKKYSIGLDIGTNSVGWAVITDDYKVPSKKFKVLGNTDRHSIKKNLIGALLFDSGETAEATRLKRTARRRYTRRKNRICYLQEIFSNEMAKVDDSFFHRLEESFLVEEDKKHERHPIFGNIVDEVAYHEKYPTIYHLRKKLADSTDKADLRLIYLALAHMIKFRGHFLIEGDLNPDNSDVDKLFIQLVQTYNQLFEENINASRVDAKAILSARLSKSRRLENLIAQLPGEKRNGLFGNLIALSLGLTPNFKSNFDLAEDAKLQLSKDTYDDDLDNLLAQIGDQYADLFLAAKNLSDAILLSDILRVNSEITKAPLSASMIKRYDEHHQDLTLLKALVRQQLPEKYKEIFFDQSKNGYAGYIDGGASQEEFYKFIKPILEKMDGTEELLAKLNREDLLRKQRTFDNGSIPHQIHLGELHAILRRQEDFYPFLKDNREKIEKILTFRIPYYVGPLARGNSRFAWMTRKSEETITPWNFEEVVDKGASAQSFIERMTNFDKNLPNEKVLPKHSLLYEYFTVYNELTKVKYVTEGMRKPEFLSGEQKKAIVDLLFKTNRKVTVKQLKEDYFKKIECFDSVEISGVEDRFNASLGTYHDLLKIIKDKDFLDNEENEDILEDIVLTLTLFEDREMIEERLKTYAHLFDDKVMKQLKRRRYTGWGRLSRKLINGIRDKQSGKTILDFLKDGFANRNFMQLIHDDSLTFKEDIQKAQVSGQGDSLHEHIANLAGSPAIKKGILQTVKVVDELVKVMGRHKPENIVIEMARENQTTQKGQKNSRERMKRIEEGIKELGSDILKEYPVENTQLQNEKLYLYYLQNGRDMYVDQELDINRLSDYDVDHIVPQSFIKDDSIDNKVLTRSDKNRGKSDNVPSEEVVKKMKNYWKQLLNAKLITQRKFDNLTKAERGGLSELDKAGFIKRQLVETRQITKHVAQILDSRMNTKYDENDKLIREVKVITLKSKLVSDFRKDFQFYKVREINNYHHAHDAYLNAVVGTALIKKYPKLESEFVYGDYKVYDVSEQEIGKATAKYFFYSNIMNFFKTEITLANGEIRKRPLIETNGETGEIVWDKGRDFATVRKVLSMPQVNIVKKTEVQTGGFSKESILPKRNSDKLIARKKDWDPKKYGGFDSPTVAYSVLVVAKVEKGKSKKLKSVKELLGITIMERSSFEKNPIDFLEAKGYKEVRKDLIIKLPKYSLFELENGRKRMLASGELQKGNELALPSKYVNFLYLASHYEKLKGSPEDNEQKQLFVEQHKHYLDEIIEQISEFSKRVILADANLDKVLSAYNKHRDKPIREQAENIIHLFTLTNFGAPAAFIYFDTTIGRNRYKSIKEVLDATLIHQSITGLYETRIDLSQLGGD

SEQ ID NO: 29 - protein, 1359 aa, Streptococcus pyogenes
MDKKYSIGLDIGTNSVGWAVITDDYKVPSKKFKVLGNTDRHSIKKNLIGALLFDSGETAEATRLKRTARRRYTRRKNRICYLQEIFSNEIAKVDDSFFHRLEESFLVEEDKKHERHPIFGNIVDEVAYHEKYPTIYHLRKKLADSTDKADLRLIYLALAHMIKFRGHFLIEGDLNPDNSDVDKLFIQLVQTYNQLFEENINASRVDAKAILSARLSKSRRLENLIAQLPGEKRNGLFGNLIALSLGLTPNFKSNFDLAEDAKLQLSKDTYDDDLDNLLAQIGDQYADLFLAAKNLSDAILLSDILRVNTEITKAPLSASMIKRYDEHHQDLTLLKALVRQQLPEKYKEIFFDQSKNGYAGYIDGGASQEEFYKFIKPILEKMDGTEELLAKLNREDLLRKQRTFDNGSIPHQIHLGELHAILRRQEDFYPFLKDNREKIEKILTFRIPYYVGPLARGNSRFAWMTRKSEETITPWNFEEVVDKGASAQSFIERMTNFDKNLPNEKVLPKHSLLYEYFTVYNELTKVKYVTEGMRKPAFLSGEQKKAIVDLLFKTNRKVTVKQLKEDYFKKIECFDSVEISGVEDRFNASLGTYHDLLKIIKDKDFLDNEENEDILEDIVLTLTLFEDREMIEERLKTYAHLFDDKVMKQLKRRRYTGWGRLSRKLINGIRDKQSGKTILDFLKDGFANRNFMQLIHDDSLTFKEDLQKAQVSGQGDSLHEHIANLAGSPAIKKGILQTVKVVDELVKVMGRHKPENIVIEMARENQTTQKGQKNSRERMKRIEEGIKELGSDILKEYPVENTQLQNEKLYLYYLQNGRDMYVDQELDINRLSDYDVDHIVPQSFLKDDSIDNKVLTRSDKNRGKSDNVPSEEVVKKMKNYWKQLLNAKLITQRKFDNLTKAERGGLSELDKAGFIKRQLVETRQITKHVAQILDSRMNTKYDENDKLIREVRVITLKSKLVSDFRKDFQFYKVREINNYHHAHDAYLNAVVGTALIKKYPKLESEFVYGDYKVYDISEQEIGKATAKYFFYSNIMNFFKTEITLANGEIRKRPLIETNGETGEIVWDKGRDFATVRKVLSMPQVNIVKKTEVQTGGFSKESILPKRNSDKLIARKKDWDPKKYGGFDSPTVAYSVLVVAKVEKGKSKKLKSVKELVGITIMERSSFEKDPVDFLEAKGYKEVRKDLIIKLPKYSLFELENGRKRMLASGELQKGNELALPSKYVNFLYLASHYEKLKGSPEDNEQKQLFVEQHKHYLDEIIEQISEFSKRVILADANLDKVLSAYNKHRDKPIREQAENIIHLFTLTNLGAPAAFKYFDTTIGRNRYKSIKEVLDATLIHQSITGLYETRIDLSQLGGD

SEQ ID NO: 30 - protein, 1359 aa, Streptococcus pyogenes
MDKKYSIGLDIGTNSVGWAVITDDYKVPSKKFKVLGNTDRHSIKKNLIGALLFDSGETAEATRLKRTARRRYTRRKNRICYLQEIFSNEIAKVDDSFFHRLEESFLVEEDKKHERHPIFGNIVDEVAYHEKYPTIYHLRKKLADSTDKADLRLIYLALAHMIKFRGHFLIEGGLNPDNSDVDKLFIQLVQTYNQLFEENINASRVDAKAILSARLSKSRRLENLIAQLPGEKRNGLFGNLIALSLGLTPNFKSNFDLAEDAKLQLSKDTYDDDLDNLLAQIGDQYADLFLAAKNLSDAILLSDILRVNTEITKAPLSASMIKRYDEHHQDLTLLKALVRQQLPEKYKEIFFDQSKNGYAGYIDGGASQEEFYKFIKPILEKMDGTEELLAKLNREDLLRKQRTFDNGSIPHQIHLGELHAILRRQEDFYPFLKDNREKIEKILTFRIPYYVGPLARGNSRFAWMTRKSEETITPWNFEEVVDKGASAQSFIERMTNFDKNLPNEKVLPKHSLLYEYFTVYNELTKVKYVTEGMRKPAFLSGEQKKAIVDLLFKTNRKVTVKQLKEDYFKKIECFDSVEISGVEDRFNASLGTYHDLLKIIKDKDFLDNEENEDILEDIVLTLTLFEDREMIEERLKTYAHLFDDKVMKQLKRRRYTGWGRLSRKLINGIRDKQSGKTILDFLKDGFANRNFMQLIHDDSLTFKEDLQKAQVSGQGDSLHEHIANLAGSPAIKKGILQTVKVVDELVKVMGRHKPENIVIEMARENQTTQKGQKNSRERMKRIEEGIKELGSDILKEYPVENTQLQNEKLYLYYLQNGRDMYVDQELDINRLSDYDVDHIVPQSFLKDDSIDNKVLTRSDKNRGKSDNVPSEEVVKKMKNYWKQLLNAKLITQRKFDNLTKAERGGLSELDKAGFIKRQLVETRQITKHVAQILDSRMNTKYDENDKLIREVRVITLKSKLVSDFRKDFQFYKVREINNYHHAHDAYLNAVVGTALIKKYPKLESEFVYGDYKVYDISEQEIGKATAKYFFYSNIMNFFKTEITLANGEIRKRPLIETNGETGEIVWDKGRDFATVRKVLSMPQVNIVKKTEVQTGGFSKESILPKRNSDKLIARKKDWDPKKYGGFDSPTVAYSVLVVAKVEKGKSKKLKSVKELVGITIMERSSFEKDPVDFLEAKGYKEVRKDLIIKLPKYSLFELENGRKRMLASGELQKGNELALPSKYVNFLYLASHYEKLKGSPEDNEQKQLFVEQHKHYLDEIIEQISEFSKRVILADANLDKVLSAYNKHRDKPIREQAENIIHLFTLTNLGAPAAFKYFDTTIGRNRYKSIKEVLDATLIHQSITGLYETRIDLSQLGGD

SEQ ID NO: 31 - protein, 1359 aa, Streptococcus pyogenes
MDKKYSIGLDIGTNSVGWAVITDDYKVPSKKFKVLGNTDRHSIKKNLIGALLFDSGETAEATRLKRTARRRYTRRKNRICYLQEIFSNEMAKVDDSFFHRLEESFLVEEDKKHERHPIFGNIVDEVAYHEKYPTIYHLRKKLVDSTDKADLRLIYLALAHMIKFRGHFLIEGDLNPDNSDVDKLFIQLVQTYNQLFEENINANGVDAKAILSARLSKSRRLENLIAQLPGEKKNGLFGNLIALSLGLTPNFKSNFDLAEDAKLQLSKDTYDDDLDNLLAQIGDQYADLFLAAKNLSDAILLSDILRVNTEITKAPLSASMIKRYDEHHQDLTLLKALVRQQLPEKYKEIFFDQSKNGYAGYIDGGASQEEFYKFIKPILEKMDGTEELLVKLNREDLLRKQRTFDNGSIPHQIHLGELHAILRRQEDFYPFLKDNREKIEKILTFRIPYYVGPLARGNSRFAWMTRKSEETITPWNFEEVVDKGASAQSFIERMTNFDKNLPNEKVLPKHSLLYEYFTVYNELTKVKYVTEGMRKPAFLSGEQKKAIVDLLFKTNRKVTVKQLKEDYFKKIECFDSVEISGVEDRFNASLGTYHDLLKIIKDKDFLDNEENEDILEDIVLTLTLFEDREMIEERLKTYAHLFDDKVMKQLKRRRYTGWGRLSRKLINGIRDKQSGKTILDFLKDGFANRNFMQLIHDDSLTFKEDIQKAQVSGQGDSLHEHIANLAGSPAIKKGILQTVKVVDELVKVMGRHKPENIVIEMARENQTTQKGQKNSRERMKRIEEGIKELGSQILKEHPVENTQLQNEKLYLYYLQNGRDMYVDQELDINRLSDYDVDHIVPQSFLKDDSIDNKVLTRSDKNRGKSDNVPSEEVVKKMKNYWRQLLNAKLITQRKFDNLTKAERGGLSELDKAGFIKRQLVETRQITKHVAQILDSRMNTKYDENDKLIREVKVITLKSKLVSDFRKDFQFYKVREINNYHHAHDAYLNAVVGTALIKKYPKLESEFVYGDYKVYDVSEQEIGKATAKYFFYSNIMNFFKTEITLANGEIRKRPLIETNGETGEIVWDKGRDFATVRKVLSMPQVNIVKKTEVQTGGFSKESILPKRNSDKLIARKKDWDPKKYGGFDSPTVAYSVLVVAKVEKGKSKKLKSVKELLGITIMERSSFEKNPIDFLEAKGYKEVKKDLIIKLPKYSLFELENGRKRMLASGELQKGNELALPSKYVNFLYLASHYEKLKGSPEDNEQKQLFVEQHKHYLDEIIEQISEFSKRVILADANLDKVLSAYNKHRDKPIREQAENIIHLFTLTNLGAPAAFKYFDTTIDRKRYTSTKEVLDATLIHQSITGLYETRIDLSQLGGD

SEQ ID NO: 32 - protein, 1359 aa, Streptococcus pyogenes
MDKKYSIGLDIGTNSVGWAVITDDYKVPSKKFKVLGNTDRHSIKKNLIGALLFDSGETAEATRLKRTARRRYTRRKNRICYLQEIFSNEMAKVDDSFFHRLEESFLVEEDKKHERHPIFGNIVDEVAYHEKYPTIYHLRKKLADSTDKADLRLIYLALAHMIKFRGHFLIEGDLNPDNSDVDKLFIQLVQTYNQLFEENINASRVDAKAILSARLSKSRRLENLIAQLPGEKKNGLFGNLIALLLGLTPNFKSNFDLAEDAKLQLSKDTYDDDLDNLLAQIGDQYADLFLAAKNLSDAILLSDILRVNSEITKAPLSASMIKRYDEHHQDLTLLKALVRQQLPEKYKEIFFDQSKNGYAGYIDGGASQEEFYKFIKPILEKMDGTEELLAKLNREDLLRKQRTFDNGSIPHQIHLGELHAILRRQEDFYPFLKDNREKIEKILTFRIPYYVGPLARGNSRFAWMTRKSEETITPWNFEEVVDKGASAQSFIERMTNFDKNLPNEKVLPKHSLLYEYFTVYNELTKVKYVTEGMRKPAFLSGEQKKAIVDLLFKTNRKVTVKQLKEDYFKKIECFDSVEISGVEDRFNASLGTYHDLLKIIKDKDFLDNEENEDILEDIVLTLTLFEDKEMIEERLKKYAHLFDDKVMKQLKRRRYTGWGRLSRKLINGIRDKQSGKTILDFLKDGFANRNFMQLIHDDSLTFKEDIQKAQVSGQGDSLHEHIANLAGSPAIKKGILQTVKVVDELVKVMGRHKPENIVIEMARENQTTQKGQKNSRERMKRIEEGIKELGSDILKEYPVENTQLQNEKLYLYYLQNGRDMYVDQELDINRLSDYDVDHIVPQSFLKDDSIDNKVLTRSDKNRGKSDNVPSEEVVKKMKNYWKQLLNAKLITQRKFDNLTKAERGGLSELDKAGFIKRQLVETRQITKHVAQILDSRMNTKYDENDKLIREVRVITLKSKLVSDFRKDFQFYKVREINNYHHAHDAYLNAVVGTALIKKYPKLESEFVYGDYKVYDVSEQEIGKATAKYFFYSNIMNFFKTEITLANGEIRKRPLIETNGETGEIVWDKGRDFATVRKVLSMPQVNIVKKTEVQTGGFSKESILPKRNSDKLIARKKDWDPKKYGGFDSPTVAYSVLVVAKVEKGKSKKLKSVKELLGITIMERSSFEKNPIDFLEAKGYKEVRKDLIIKLPKYSLFELENGRKRMLASGELQKGNELALPSKYVNFLYLASHYEKLKGSPEDNEQKQLFVEQHKHYLDEIIEQISEFSKRVILADANLDKVLSAYNKHRDKPIREQAENIIHLFTLTNLGAPAAFKYFDTTIDRKRYTSTKEVLDATLIHQSITGLYETRIDLSQLGGD

SEQ ID NO: 33 - protein, 1359 aa, Streptococcus pyogenes
MDKKYSIGLDIGTNSVGWAVITDDYKVPSKKFKVLGNTDRHSIKKNLIGALLFDSGEIAEATRLKRTARRRYTRRKNRICYLQEIFSNEMAKVDDSFFHRLEESFLVEEDKKHERHPIFGNIVDEVAYHEKYPTIYHLRKKLVDSTDKADLRLIYLALAHMIKFRGHFLIEGDLNPDNSDVDKLFIQLVQTYNQLFEENINASGVDAKAILSARLSKSRRLENLIAQLPGEKKNGLFGNLIALSLGLTPNFKSNFDLAEDAKLQLSKDTYDDDLDNLLAQIGDQYADLFLAAKNLSDAILLSDILRLNSEITKAPLSASMIKRYDEHHQDLTLLKALVRQQLPEKYKEIFFDQSKNGYAGYIDGGASQEEFYKFIKPILEKMDGTEELLAKLNRKDLLRKQRTFDNGSIPHQIHLGELHAILRRQEDFYPFLKDNREKIEKILTFRIPYYVGPLARGNSRFAWMTRKSEETITPWNFEEVVDKGASAQSFIERMTNFDKNLPNEKVLPKHSLLYEYFTVYNELTKVKYVTEGMRKPAFLSGEQKKAIVDLLFKTNRKVTVKQLKEDYFKKIECFDSVEISGVEDRFNASLGTYHDLLKIIKDKDFLDNEENEDILEDIVLTLTLFEDREMIEERLKTYAHLFDDKVMKQLKRRRYTGWGRLSRKLINGIRDKQSGKTILDFLKDGFANRNFMQLIHDDSLTFKEDIQKAQVSGQGDSLHEHIANLAGSPAIKKGILQTVKVVDELVKVMGRHKPENIVIEMARENQTTQKGQKNSRERMKRIEEGIKELGSQILKEHPVENTQLQNEKLYLYYLQNGRDMYVDQELDINRLSDYDVDHIVPQSFIKDDSIDNKVLTRSDKNRGKSDNVPSEEVVKKMKNYWRQLLNAKLITQRKFDNLTKAERGGLSELDKAGFIKRQLVETRQITKHVAQILDSRMNTKYDENDKLIREVKVITLKSKLVSDFRKDFQFYKVREINNYHHAHDAYLNAVVGTALIKKYPKLESEFVYGDYKVYDVSEQEIGKATAKYFFYSNIMNFFKTEITLANGEIRKRPLIETNGETGEIVWDKGRDFATVRKVLSMPQVNIVKKTEVQTGGFSKESILPKRNSDKLIARKKDWDPKKYGGFDSPTVAYSVLVVAKVEKGKSKKLKSVKELLGITIMERSSFEKNPIDFLEAKGYKEVRKDLIIKLPKYSLFELENGRKRMLASGELQKGNELALPSKYVNFLYLASHYEKLKGSPEDNEQKQLFVEQHKHYLDEIIEQISEFSKRVILADANLDKVLSAYNKHRDKPIREQAENIIHLFTLTNLGAPTAFKYFDTTIDRKRYTSTKEVLDATFIHQSITGLYETRIDLSQLGGD

SEQ ID NO: 34 - protein, 1184 aa, Streptococcus pyogenes
PDNSDVDKLFIQLVQTYNQLFEENINASGVDAKAILSARLSKSRRLENLIAQLPGEKKNGLFGNLIALSLGLTPNFKSNFDLAEDAKLQLSKDTYDDDLDNLLAQIGDQYADLFLAAKNLSDAILLSDILRVNTEITKAPLSASMIKRYDEHHQDLTLLKALVRQQLPEKYKEIFFDQSKNGYAGYIDGGASQEEFYKFIKPILEKMDGTEELLVKLNREDLLRKQRTFDNGSIPHQIHLGELHAILRRQEDFYPFLKDNREKIEKILTFRIPYYVGPLARGNSRFAWMTRKSEETITPWNFEEVVDKGASAQSFIERMTNFDKNLPNEKVLPKHSLLYEYFTVYNELTKVKYVTEGMRKPAFLSGEQKKAIVDLLFKTNRKVTVKQLKEDYFKKIECFDSVEISGVEDRFNASLGTYHDLLKIIKDKDFLDNEENEDILEDIVLTLTLFEDREMIEERLKTYAHLFDDKVMKQLKRRRYTGWGRLSRKLINGIRDKQSGKTILDFLKDGFANRNFMQLIHDDSLTFKEDIQKAQVSGQGDSLHEHIANLAGSPAIKKGILQTVKVVDELVKVMGRHKPENIVIEMARENQTTQKGQKNSRERMKRIEEGIKELGSQILKEHPVENTQLQNEKLYLYYLQNGRDMYVDQELDINRLSDYDVDHIVPQSFLKDDSIDNKVLTRSDKNRGKSDNVPSEEVVKKMKNYWRQLLNAKLITQRKFDNLTKAERGGLSELDKAGFIKRQLVETRQITKHVAQILDSRMNTKYDENDKLIREVKVITLKSKLVSDFRKDFQFYKVREINNYHHAHDAYLNAVVGTALIKKYPKLESEFVYGDYKVYDVSEQEIGKATAKYFFYSNIMNFFKTEITLANGEIRKRPLIETNGETGEIVWDKGRDFATVRKVLSMPQVNIVKKTEVQTGGFSKESILPKRNSDKLIARKKDWDPKKYGGFDSPTVAYSVLVVAKVEKGKSKKLKSVKELLGITIMERSSFEKNPIDFLEAKGYKEVKKDLIIKLPKYSLFELENGRKRMLASGELQKGNELALPSKYVNFLYLASHYEKLKGSPEDNEQKQLFVEQHKHYLDEIIEQISEFSKRVILADANLDKVLSAYNKHRDKPIREQAENIIHLFTLTNLGAPAAFKYFDTTIDRKRYTSTKEVLDATLIHQSITGLYETRIDLSQLGGD

SEQ ID NO: 35 - protein, 1359 aa, Streptococcus pyogenes
MDKKYSIGLDIGTNSVGWAVITDDYKVPSKKFKVLGNTDRHSIKKNLIGALLFDSGETAEATRLKRTARRRYTRRKNRICYLQEIFSNEMAKVDDSFFHRLEESFLVEEDKKHERHPIFGNIVDEVAYHEKYPTIYHLRKKLADSTDKADLRLIYLALAHMIKFRGHFLIEGDLNPDNSDVDKLFIQLVQTYNQLFEENINASRVDAKAILSARLSKSRRLENLIAQLPGEKKNGLFGNLIALSLGLTPNFKSNFDLAEDAKLQLSKDTYDDDLDNLLAQIGDQYADLFLAAKNLSDATLLSDILRVNSEITKAPLSASMIKRYDEHHQDLTLLKALVRQQLPEKYKEIFFDQSKNGYAGYIDGGASQEEFYKFIKPILEKMDGTEELLAKLNREDLLRKQRTFDNGSIPHQIHLGELHAILRRQEDFYPFLKDNREKIEKILTFRIPYYVGPLARGNSRFAWMTRKSEETITPWNFEEVVDKGASAQSFIERMTNFDKNLPNEKVLPKHSLLYEYFTVYNELTKVKYVTEGMRKPAFLSGEQKKAIVDLLFKTNRKVTVKQLKEDYFKKIECFDSVEISGVEDRFNASLGTYHDLLKIIKDKDFLDNEENEDILEDIVLTLTLFEDREMIEERLKTYAHLFDDKVMKQLKRRRYTGWGRLSRKLINGIRDKQSGKTILDFLKDGFANRNFMQLIHDDSLTFKEDIQKAQVSGQGDSLHEHIANLAGSPAIKKGILQTVKVVDELVKVMGRHKPENIVIEMARENQTTQKGQKNSRERMKRIEEGIKELGSDILKEYPVENTQLQNEKLYLYYLQNGRDMYVDQELDINRLSDYDVDHIVPQSFLKDDSIDNKVLTRSDKNRGKSDNVPSEEVVKKMKNYWRQLLNAKLITQRKFDNLTKAERGGLSELDKAGFIKRQLVETRQITKHVAQILDSRMNTKYDENDKLIREVKVITLKSKLVSDFRKDFQFYKVREINNYHHAHDAYLNAVVGTALIKKYPKLESEFVYGDYKVYDVSEQEIGKATAKYFFYSNIMNFFKTEITLANGEIRKRPLIETNGETGEIVWDKGRDFATVRKVLSMPQVNIVKKTEVQTGGFSKESILPKRNSDKLIARKKDWDPKKYGGFDSPTVAYSVLVVAKVEKGKSKKLKSVKELLGITIMERSSFEKNPIDFLEAKGYKEVRKDLIIKLPKYSLFELENGRKRMLASGELQKGNELALPSKYVNFLYLASHYEKLKGSPEDNEQKQLFVEQHKHYLDEIIEQISEFSKRVILADANLDKVLSAYNKHRDKPIREQAENIIHLFTLTNLGAPAAFKYFDTTIDRKRYTSTKEVLDATLIHQSITGLYETRIDLSQLGGD

SEQ ID NO: 36 - protein, 1358 aa, Streptococcus pyogenes
MDKKYSIGLDIGTNSVGWAVITDDYKVPSKKFKVLGNTDRHSIKKNLIGALLFDSGETAEATRLKRTARRRYTRRKNRICYLQEIFSNEMAKVDDSFFHRLEESFLVEEDKKHERHPIFGNIVDEVAYHEKYPTIYHLRKKLADSTDKVDLRLIYLALAHMIKFRGHFLIEGDLNPDNSDVDKLFIQLVQTYNQLFEENINASRVDAKAILSARLSKSRRLENLIAQLPGEKKNGLFGNLIALSLGLTPNFKSNFDLAEDTKLQLSKDTYDDDLDNLLAQIGDQYADLFLAAKNLSDAILLSDILRVNSEITKAPLSASMIKRYDEHHQDLTLLKALVRQQLPEKYKEIFFDQSKNGYAGYIDGGASQEEFYKFIKPILEKMDGTEELLAKLNREDLLRKQRTFDNGSIPYQIHLGELHAILRRQEDFYPFLKDNREKIEKILTFRIPYYVGPLARGNSRFAWMTRKSEETITPWNFEEVVDKGASAQSFIERMTNFDKNLPNEKVLPKHSLLYEYFTVYNELTKVKYVTEGMRKPAFLSGEQKKAIVDLLFKTNRKVTVKQLKEDYFKKIECFDSVEISGVEDRFNTSLGTYHDLLKIIKDKDFLDNEENEDILEDIVLTLTLFEDKEMIEERLKKYANLFDDKVMKQLKRRHYTGWGRLSRKLINGIRDKQSGKTILDFLKDGFANRNFMQLINDDSLTFKEAIQKAQVSGQGHSLHEQIANLAGSPAIKKGILQTVKIVDELVKVMGHKPENIVIEMARENQTTQKGQKNSRERMKRIEEGIKELGSQILKEHPVENTQLQNEKLYLYYLQNGRDMYVDQELDINRLSDYDVDHIVPQSFLKDDSIDNKVLTRSDKNRGKSDNVPSEEVVKKMKNYWRQLLNAKLITQRKFDNLTKAERGGLSELDKAGFIKRQLVETRQITKHVAQILDSRMNTKYDENDKLIREVKVITLKSKLVSDFRKDFQFYKVREINNYHHAHDAYLNAVVGTALIKKYPKLESEFVYGDYKVYDVSEQEIGKATAKYFFYSNIMNFFKTEITLANGEIRKRPLIETNGETGEIVWDKGRDFATVRKVLSMPQVNIVKKTEVQTGGFSKESILPKRNSDKLIARKKDWDPKKYGGFDSPTVAYSVLVVAKVEKGKSKKLKSVKELLGITIMERSSFEKNPIDFLEAKGYKEVRKDLIIKLPKYSLFELENGRKRMLASGELQKGNELALPSKYVNFLYLASHYEKLKGSPEDNEQKQLFVEQHKHYLDEIIEQISEFSKRVILADANLDKVLSAYNKHRDKPIREQAKNIIHLFTLTNLGAPAAFKYFDTTIERNRYKSIKEVLDATLIHQSITGLYETRIDLSQLGGD

SEQ ID NO: 37 - protein, 1359 aa, Streptococcus pyogenes
MDKKYSIGLDIGTNSVGWAVITDDYKVPSKKFKVLGNTDRHSIKKNLIGALLFDSGETAEATRLKRTARRRYTRRKNRICYLQEIFSNEMAKVDDSFFHRLEESFLVEEDKKHERHPIFGNIVDEVAYHEKYPTIYHLRKKLADSTDKADLRLIYLALAHMIKFRGHFLIEGDLNPDNSDVDKLFIQLVQTYNQLFEENINASRVDAKAILSARLSKSRRLENLIAQLPGEKRNGLFGNLIALSLGLTPNFKSNFDLAEDAKLQLSKDTYDDDLDNLLAQIGDQYADLFLAAKNLSDAILLSDILRVNSEITKAPLSASMIKRYDEHHQDLTLLKALVRQQLPEKYKEIFFDQSKNGYAGYIDGGASQEEFYKFIKPILEKMDGTEELLAKLNREDLLRKQRTFDNGSIPHQIHLGELHAILRRQEDFYPFLKDNREKIEKILTFRIPYYVGPLARGNSRFAWMTRKSEETITPWNFEEVVDKGASAQSFIERMTNFDKNLPNEKVLPKHSLLYEYFTVYNELTKVKYVTEGMRKPAFLSGEQKKAIVDLLFKTNRKVTVKQLKEDYFKKIECFDSVEISGVEDRFNASLGTYHDLLKIIKDKDFLDNEENEDILEDIVLTLTLFEDREMIEERLKTYAHLFDDKVMKQLKRRRYTGWGRLSRKLINGIRDKQSGKTILDFLKDGFANRNFMQLIHDDSLTFKEDIQKAQVSGQGDSLHEHIANLAGSPAIKKGILQTVKIVDELVKVMGRHKPENIVIEMARENQTTQKGQKNSRERMKRIEEGIKELGSDILKEYPVENTQLQNEKLYLYYLQNGRDMYVDQELDINRLSDYDVDHIVPQSFLKDDSIDNKVLTRSDKNRGKSDNVPSEEVVKKMKNYWKQLLNAKLITQRKFDNLTKAERGGLSELDKAGFIKRQLVETRQITKHVAQILDSRMNTKYDENDKLIREVKVITLKSKLVSDFRKDFQFYKVREINNYHHAHDAYLNAVVGTALIKKYPKLESEFVYGDYKVYDVSEQEIGKATAKYFFYSNIMNFFKTEITLANGEIRKRPLIETNGETGEIVWDKGRDFATVRKVLSMPQVNIVKKTEVQTGGFSKESILPKRNSDKLIARKKDWDPKKYGGFDSPTVAYSVLVVAKVEKGKSKKLKSVKELLGITIMERSSFEKNPIDFLEAKGYKEVRKDLIIKLPKYSLFELENGRKRMLASGELQKGNELALPSKYVNFLYLASHYEKLKGSPEDNEQKQLFVEQHKHYLDEIIEQISEFSKRVILADANLDKVLSAYNKHRDKPIREQAENIIHLFTLTNLGAPAAFKYFDTTIGRNRYKSIKEVLDATLIHQSITGLYETRIDLSQLGGD

SEQ ID NO: 38 - protein, 1270 aa, Streptococcus pyogenes
MAKVDDSFFHRLEESFLVEEDKKHERHPIFGNIVDEVAYHEKYPTIYHLRKKLVDSTDKADLRLIYLALAHMIKFRGHFLIEGDLNPDNSDVDKLFIQLVQTYNQLFEENINASGVDAKAILSARLSKSRRLENLIAQLPGEKKNGLFGNLIALSLGLTPNFKSNFDLAEDAKLQLSKDTYDDDLDNLLAQIGDQYADLFLAAKNLSDAILLSDILRVNTEITKAPLSASMIKRYDEHHQDLTLLKALVRQQLPEKYKEIFFDQSKNGYAGYIDGGASQEEFYKFIKPILEKMDGTEELLVKLNREDLLRKQRTFDNGSIPHQIHLGELHAILRRQEDFYPFLKDNREKIEKILTFRIPYYVGPLARGNSRFAWMTRKSEETITPWNFEEVVDKGASAQSFIERMTNFDKNLPNEKVLPKHSLLYEYFTVYNELTKVKYVTEGMRKPAFLSGEQKKAIVDLLFKTNRKVTVKQLKEDYFKKIECFDSVEISGVEDRFNASLGTYHDLLKIIKDKDFLDNEENEDILEDIVLTLTLFEDREMIEERLKTYAHLFDDKVMKQLKRRRYTGWGRLSRKLINGIRDKQSGKTILDFLKDGFANRNFMQLIHDDSLTFKEDIQKAQVSGQGDSLHEHIANLAGSPAIKKGILQTVKVVDELVKVMGRHKPENIVIEMARENQTTQKGQKNSRERMKRIEEGIKELGSQILKEHPVENTQLQNEKLYLYYLQNGRDMYVDQELDINRLSDYDVDHIVPQSFLKDDSIDNKVLTRSDKNRGKSDNVPSEEVVKKMKNYWRQLLNAKLITQRKFDNLTKAERGGLSELDKAGFIKRQLVETRQITKHVAQILDSRMNTKYDENDKLIREVKVITLKSKLVSDFRKDFQFYKVREINNYHHAHDAYLNAVVGTALIKKYPKLESEFVYGDYKVYDVSEQEIGKATAKYFFYSNIMNFFKTEITLANGEIRKRPLIETNGETGEIVWDKGRDFATVRKVLSMPQVNIVKKTEVQTGGFSKESILPKRNSDKLIARKKDWDPKKYGGFDSPTVAYSVLVVAKVEKGKSKKLKSVKELLGITIMERSSFEKNPIDFLEAKGYKEVKKDLIIKLPKYSLFELENGRKRMLASGELQKGNELALPSKYVNFLYLASHYEKLKGSPEDNEQKQLFVEQHKHYLDEIIEQISEFSKRVILADANLDKVLSAYNKHRDKPIREQAENIIHLFTLTNLGAPAAFKYFDTTIDRKRYTSTKEVLDATLIHQSITGLYETRIDLSQLGGD

SEQ ID NO: 39 - protein, 536 aa, Streptococcus pyogenes MGAS2111
QELDINRLSGYDVDHIVPQSFLKDDSIDNKVLTRSDKNRGKSDNVPSEEVVKKMKNYWRQLLNAKLITQRKFDNLTKAERGGLSELDKVGFIKRQLVETRQITKHVAQILDSRMNTKYDENDKLIREVRVITLKSKLVSDFRKDFQFYKVREINNYHHAHDAYLNAVVGTALIKKYPKLESEFVYGDYKVYDVSEQEIGKATAKYFFYSNIMNFFKTEITLANGEIRKRPLIETNGETGEIVWDKGRDFATVRKVLSMPQVNIVKKTEVQTGGFSKESILPKRNSDKLIARKKDWDPKKYGGFDSPTVAYSVLVVAKVEKGKSKKLKSVKELLGITIMERSSFEKDPIDFLEAKGYKEVRKDLIIKLPKYSLFELENGRKRMLASGELQKGNELALPSKYVNFLYLASHYEKLKGSPEDNEQKQLFVEQHKHYLDEIIEQISEFSKRVILADANLDKVLSAYNKHRDKPIREQAENIIHLFTLTNLGAPAAFKYFDTTIDRKRYTSTKEVLDATLIHQSITGLYETRIDLSQLGGD

SEQ ID NO: 40 - protein, 305 aa, Streptococcus pyogenes SS1447
IETNGETGEIVWDKGRDFATVRKVLSMPQVNIVKKTEVQTGGFSKESILPKRNSDKLIARKKDWDPKKYGGFDSPTVAYSVLVVAKVEKGKSKKLKSVKELLGITIMERSSFEKDPIDFLEAKGYKEVRKDLIIKLPKYSLFELENGRKRMLASGELQKGNELALPSKYVNFLYLASHYEKLKGSPEDNEQKQLFVEQHKHYLDEIIEQISEFSKRVILADANLDKVLSAYNKHRDKPIREQAENIIHLFTLTNLGAPAAFKYFDTTIDRKRYTSTKEVLDATLIHQSITGLYETRIDLSQLGGD

SEQ ID NO: 41 - protein, 1359 aa, Artificial Sequence
  Synthetic Polypeptide
MDKKYSIGLDIGTNSVGWAVITDDYKVPSKKFKVLGNTDRHSIKKNLIGALLFDSGEIAEATRLKRTARRRYTRRKNRICYLQEIFSNEMAKVDDSFFHRLEESFLVEEDKKHERHPIFGNIVDEVAYHEKYPTIYHLRKKLVDSTDKADLRLIYLALAHMIKFRGHFLIEGDLNPDNSDVDKLFIQLVQTYNQLFEENINASGVDAKAILSARLSKSRRLENLIAQLPGEKKNGLFGNLIALSLGLTPNFKSNFDLAEDAKLQLSKDTYDDDLDNLLAQIGDQYADLFLAAKNLSDAILLSDILRLNSEITKAPLSASMIKRYDEHHQDLTLLKALVRQQLPEKYKEIFFDQSKNGYAGYIDGGASQEEFYKFIKPILEKMDGTEELLAKLNREDLLRKQRTFDNGSIPHQIHLGELHAILRRQEDFYPFLKDNREKIEKILTFRIPYYVGPLARGNSRFAWMTRKSEETITPWNFEEVVDKGASAQSFIERMTNFDKNLPNEKVLPKHSLLYEYFTVYNELTKVKYVTEGMRKPAFLSGEQKKAIVDLLFKTNRKVTVKQLKEDYFKKIECFDSVEISGVEDRFNASLGTYHDLLKIIKDKDFLDNEENEDILEDIVLTLTLFEDREMIEERLKTYAHLFDDKVMKQLKRRRYTGWGRLSRKLINGIRDKQSGKTILDFLKDGFANRNFMQLIHDDSLTFKEDIQKAQVSGQGDSLHEHIANLAGSPAIKKGILQTVKVVDELVKVMGRHKPENIVIEMARENQTTQKGQKNSRERMKRIEEGIKELGSQILKEHPVENTQLQNEKLYLYYLQNGRDMYVDQELDINRLSDYDVDHIVPQSFIKDDSIDNKVLTRSDKNRGKSDNVPSEEVVKKMKNYWRQLLNAKLITQRKFDNLTKAERGGLSELDKAGFIKRQLVETRQITKHVAQILDSRMNTKYDENDKLIREVKVITLKSKLVSDFRKDFQFYKVREINNYHHAHDAYLNAVVGTALIKKYPKLESEFVYGDYKVYDVSEQEIGKATAKYFFYSNIMNFFKTEITLANGEIRKRPLIETNGETGEIVWDKGRDFATVRKVLSMPQVNIVKKTEVQTGGFSKESILPKRNSDKLIARKKDWDPKKYGGFDSPTVAYSVLVVAKVEKGKSKKLKSVKELLGITIMERSSFEKNPIDFLEAKGYKEVRKDLIIKLPKYSLFELENGRKRMLASGELQKGNELALPSKYVNFLYLASHYEKLKGSPEDNEQKQLFVEQHKHYLDEIIEQISEFSKRVILADANLDKVLSAYNKHRDKPIREQAENIIHLFTLTNLGAPTAFKYFDTTIDRKRYTSTKEVLDATFIHQSITGLYETRIDLSQLGGD

SEQ ID NO: 42 - protein, 1341 aa, Artificial Sequence
  Synthetic Polypeptide
MDQKYSIGLDIGTNSVGWAVVTDDYKVPAKKMKVLGNTDKQSIKKNLLGALLFDSGETAEATRLKRTARRRYTRRRNRLRYLQEIFAEEMNKVDENFFQRLDDSFLVDEDKRGERHPIFGNIAAEVKYHDDFPTIYHLRKHLADISQKADLRLVYLALAHMIKFRGHFLIEGQLKAENTNVQALFKDFVEVYDKTVEESHLSEMTVDALSILTEKVSKSRRLENLIAHYPAEKKNTLFGNLIALSLGLQPNFKTNFQLSEDAKLQFSKDTYEEDLEGLLGEIGDEYADLFASAKNLYDAILLSGILTVDDNSTKAPLSASMVKRYEEHQKDLKKLKDFIKVNAPDQYNAIFKDKNKKGYAGYIENGVKQDEFYKYLKGILLQINGSGDFLDKIDREDFLRKQRTFDNGSIPHQIHLQEMHAILRRQEEHYPFLKENQDKIEKILTFRIPYYVGPLARKGSRFAWAEYKADEKITPWNFDDILDKEKSAEKFITRMTLNDLYLPEEKVLPKHSLLYETFTVYNELTKVKYVNEQGEAKFFDANMKQEIFDHVFKENRKVTKDKLLNYLNKEFEEFRIVNLTGLDKENKAFNSSLGTYHDLRKILDKSFLDDKANEKTIEDIIQTLTLFEDREMIRQRLQKYSDIFTKAQLKKLERRHYTGWGRLSYKLINGIRNKENKKTILDYLIDDGYANRNFMQLINDDALSFKEEIARAQIIGDVDDIANVVHDLPGSPAIKKGILQSVKIVDELVKVMGHNPANIIIEMARENQMTDKGRRNSQQRLKLLQDSLKPVNIKNVENQQLQNDRLFLYYIQNGKDMYTGETLDINNLSQYDIDHIIPQAFIKDNSLDNRVLTRSDKNRGKSDDVPSIEVVHEMKSFWSKLLSVKLITQRKFDNLTKAERGGLTEEDKAGFIKRQLVETRQITKHVAQILDERFNTEFDGNKRRIRNVKIITLKSNLVSNFRKEFELYKVREINDYHHAHDAYLNAVVGNALLLKYPQLEPEFVYGEYPKYNSYRSRKSATEKFLFYSNILRFFKKEDIQTNEDGEIAWNKEKHIKILRKVLSYPQVNIVKKTEEQTGGFSKESILPKGESDKLIPRKTKNSYWNPKKYGGFDSPVVAYSILVFADVEKGKSKKLRKVQDMVGITIMEKKRFEKHPVDFLEQRGYRNVRLEKIIKLPKYSLFELENKRRRLLASARELQKGNELVIPQRFTTLLYHSYQIEKNYEPEHREYVEKHKDEFKELLEYISVFSRKYVLADNNLTKIEMLFSKNKDAEVSSLAKSFISLLTFTAFGAPAAFNFFGENIDRKRYTSVTECLNATLIHQSITGLYETRIDLSKLGED

SEQ ID NO: 43 - protein, 1356 aa, Artificial Sequence
  Synthetic Polypeptide
MTKKNYSIGLDIGTNSVGWAVITDDYKVPAKKMKVLGNTDKKYIKKNLLGALLFDSGETAEATRLKRTARRRYTRRKNRLRYLQEIFAEEMTKVDESFFQRLDESFLRWDDDNKKLGRYPIFGNKADVVKYHQEFPTIYHLRKHLADSSEKADLRLVYLALAHMIKFRGHFLIEGELNAENTDVQKIFADFVGVYDRTFDDSHLSEITVDAASILTEKISKSRRLENLIKYYPTEKKNTLFGNLIALALGLQPNFKMNFKLSEDAKLQFSKDSYEEDLGELLGKIGDDYADLFTSAKNLYDAILLSGILIVDDNSTKAPLSASMIKRYVEHQEDLEKLKEFIKANKSELYHDIFKDKNKNGYAGYIENGVKQDEFYKYLKNTLSKIAGSDYFLDKIEREDFLRKQRTFDNGSIPHQIHLQEMHAILRRQGDYYPFLKENQDRIEKILTFRIPYYVGPLARKDSRFSWAEYHSDEKITPWNFDKVIDKEKSAEKFITRMTLNDLYLPEEKVLPKHSHVYETYAVYNELTKIKYVNEQGKDSFFDSNMKQEIFDHVFKENRKVTKEKLLNYLNKEFPEYRIKDLIGLDKENKSFNASLGTYHDLKKILDKAFLDDKVNEEVIEDIIKTLTLFEDKDMIHERLQKYSDIFTADQLKKLERRHYTGWGRLSYKLINGIRNKENNKTILDYLIDDGSANRNFMQLINDDTLPFKQIIQKSQVVGDVDDIEAVVHDLPGSPAIKKGILQSVKIVDELVKVMGDNPDNIVIEMARENQTTNRGRSQSQQRLKKLQNSLKPSYIEDKVENSHLQNDQLFLYYIQNGKDMYTGDELDIDHLSDYDIDHIIPQAFIKDDSIDNRVLTSSAKNRGKSDDVPSLDIVRARKAEWVRLYKSGLISKRKFDNLTKAERGGLTEADKAGFIKRQLVETRQITKHVAQILDARFNTESDENDKVIRDVKVITLKSNLVSQFRKDFEFYKVREINDYHHAHDAYLNAVVGTALLKKYPKLASEFVYGEYKKYDISSDKATAKYFFYSNLMNFFKRVIRYSNGKVIVRPVVEYSKDTEDIAWDKKSNFRTICKVLSYPQVNIVKKVETQTGGFSKESILPKGDSDKLIPRKTKKAYWDTKKYGGFDSPTVAYSVFVVADVEKGKAKKLKTVKELVGISIMERSFFEENPVEFLENKGYHNIREDKLIKLPKYSLFEFEGGKRRLLASASELQKGNEMVIPGHLVKLLYHAQRINSFNSTKYLDYVSAHKKEFEKVLSCVEDFANLYVDVEKNLSKIRAVADSMDNFSIEEISNSFINLLTLTALGAPADFNFLGEKIPRKRYTSTKECLNATLIHQSITGLYETRIDLSKIGEE

SEQ ID NO: 44 - protein, 1365 aa, Streptococcus agalactiae
MNKPYSIGLDIGTNSVGWSIITDDYKVPAKKIRVLGNTDKEYIKKNLIGALLFDGGNTAADRRLKRTARRRYTRRRNRILYLQEIFAEEMSKVDDSFFHRLEDSFLVEEDKRGSKYPIFATLQEEKYYHEKFPTIYHLRKELADKKEKADLRLVYLALAHIIKFRGHFLIEDDRFDVRNTDIQKQYQAFLEIFDTTFENNDLLSQDVDVEAILTDKISKSAKKDRILAQYPNQKSTGIFAEFLKLIVGNQADFKKHFNLEDKTPLQFAKDSYDEDLENLLGQIGDEFADLFSAAKKLYDSVLLSGILTVTDLSTKAPLSASMIQRYDEHREDLKQLKQFVKASLPEKYQEIVADSSKDGYAGYIEGKTNQEAFYKYLSKLLTKQEGSEYFLEKIKNEDFLRKQRTFDNGSIPHQVHLTELRAIIRRQSEYYPFLKENLDRIEKILTFRIPYYVGPLAREKSDFAWMTRKTDDSIRPWNFEDLVDKEKSAEAFIHRMTNNDLYLPEEKVLPKHSLIYEKFTVYNELTKVRFLAEGFKDFQFLNRKQKETIFNSLFKEKRKVTEKDIISFLNKVDGYEGIAIKGIEKQFNASLSTYHDLKKILGKDFLDNTDNELILEDIVQTLTLFEDREMIKKRLDIYKDFFTESQLKKLYRRHYTGWGRLSAKLINGIRNKENQKTILDYLIDDGSANRNFMQLIKDAGLSFKPIIDKARTGSHSDNLKEVIGELAGSPAIKKGILQSLKIVDELVKVMGYEPEQIVVEMARENQTTAKGLSRSRQRLTTLRESLANLKSEKKPKYVKDQVENHHLSDDRLFLYYLQNGKDMYTDDELDIDNLSQYDIDHIIPQAFIKDDSIDNRVLVSSAKNRGKSDDVPSLEIVKDCKVFWKKLLDAKLMSQRKYDNLTKAERGGLTSDDKARFIQRQLVETRQITKHVARILDERFNNELDSKGRRIRKVKIVTLKSNLVSNFRKEFVFYKIREVNNYHHAHDAYLNAVVAKAILTKYPQLEPEFVYGDYPKYNSYKTRKATEKLFFYSNIMNFFKTKVTLADGTVVVKDDIEVNNDTGEIVWDKKKHFATVRKVLSYPQVNIVKKTEIQTGGFSKESILAHGNSDKLIPRKTKDIYLDPKKYGGFDSPIVAYSVLVVADIKKGKAQKLKTVTELLGITIMERSRFEKNPSAFLESKGYLNIRTDKLIILPKYSLFELENGRRRLLASAGELQKGNELALPTQFMKFLYLASRYNESKGKPEEIEKKQEFVNQHVSYFDDIFQIINDFSKRVILADANLEKINRLYQDNKENIPVDELANNIINLFTFTSLGAPAAFKFFDKIVDRKRYTSTKEVLNSTLIHQSITGLYETRIDLGKLGED

SEQ ID NO: 45 - protein, 1365 aa, Streptococcus agalactiae
MNKPYSIGLDIGTNSVGWSIITDDYKVPAKKMRVLGNTDKEYIKKNLIGALLFDGGNTAADRRLKRTARRRYTRRRNRILYLQEIFAEEMSKVDDSFFHRLEDSFLVEEDKRGSKYPIFATLQEEKDYHEKFPTIYHLRKELADKQEKADLRLIYLALAHIIKFRGHFLIEDDRFDVRNTDIQKQYQAFLEIFDTTFENNHLLSQNVDVEAILTDKISKSAKKDRILAQYPNQKSTGIFAEFLKLIVGNQADFKKHFNLEDKTPLQFAKDSYDEDLENLLGQIGDEFADLFSAAKKLYDSVLLSGILTVIDLSTKAPLSASMIQRYDEHREDLKQLKQFVKASLPEKYQEIFADSSKDGYAGYIEGKTNQEAFYKYLSKLLTKQEDSENFLEKIKNEDFLRKQRTFDNGSIPHQVHLTELKAIIRRQSEYYPFLKENQDRIEKILTFRIPYYIGPLAREKSDFAWMTRKTDDSIRPWNFEDLVDKEKSAEAFIHRMTNNDFYLPEEKVLPKHSLIYEKFTVYNELTKVRYKNEQGETYFFDSNIKQEIFDGVFKEHRKVSKKKLLDFLAKEYEEFRIVDVIGLDKENKAFNASLGTYHDLEKILDKDFLDNPDNESILEDIVQTLTLFEDREMIKKRLENYKDLFTESQLKKLYRRHYTGWGRLSAKLINGIRDKESQKTILDYLIDDGRSNRNFMQLINDDGLSFKSIISKAQAGSHSDNLKEVVGELAGSPAIKKGILQSLKIVDELVKVMGYEPEQIVVEMARENQTTNQGRRNSRQRYKLLDDGVKNLASNILKEYPTDNQALQNERLFLYYLQNGRDMYTGEALDIDNLSQYDIDHIIPQAFIKDDSIDNRVLVSSAKNRGKSDDVPSLEIVKDCKVFWKKLLDAKLMSQRKYDNLTKAERGGLTSDDKARFIQRQLVETRQITKHVARILDERFNNELDSKGRRIRKVKIVTLKSNLVSNFRKEFGFYKIREVNDYHHAHDAYLNAVVAKAILTKYPQLEPEFVYGLYRRKKLSKIVRATRKMFFYSNLMNMFKRVVRLADGSIVVRPVIETGRYMGKTAWDKKKHFATVRKVLSYPQVNIVKKTEIQTGGFSKESILAHGNSDKLIPRKTKDIYLDPKKYGGFDSPIVAYSVLVVADIKKGKAQKLKTVTELLGITIMERSKFEKNPSAFLESKGYLNIRDDKLMILPKYSLFELENGRRRLLASAGELQKGNELALPTQFMKFLYLASRYNESKGKPEEIEKKQEFVNQHVSYFDDILQLINDFSKRVILADANLEKINKLYQDNKENISVDELANNIINLFTFTSLGAPAAFKFFDKIVDRKRYTSTKEVLNSTLIHQSITGLYETRIDLSKLGED

SEQ ID NO: 46 - protein, 1365 aa, Streptococcus agalactiae
MNKPYSIGLDIGTNSVGWSIITDDYKVPAKKMRVLGNTDKEYIKKNLIGALLFDGGNTAADRRLKRTARRRYTRRRNRILYLQEIFAEEMSKVDDSFFHRLEDSFLVEEDKRGSKYPIFATLQEEKDYHEKFSTIYHLRKELADKKEKADLRLIYIALAHIIKFRGHFLIEDDSFDVRNTDISKQYQDFLEIFNITFENNDLLSQNVDVEAILTDKISKSAKKDRILAQYPNQKSTGIFAEFLKLIVGNQADFKKYFNLEDKTPLQFAKDSYDEDLENLLGQIGDEFADLFSAAKKLYDSVLLSGILTVIDLSTKAPLSASMIQRYDEHREDLKQLKQFVKASLPEKYQEIFADSSKDGYAGYIEGKTNQEAFYKYLSKLLTKQEDSENFLEKIKNEDFLRKQRTFDNGSIPHQVHLTELKAIIRRQSEYYPFLKENQDRIEKILTFRIPYYIGPLAREKSDFAWMTRKTDDSIRPWNFEDLVDKEKSAEAFIHRMTNNDFYLPEEKVLPKHSLIYEKFTVYNELTKVRYKNEQGETYFFDSNIKQEIFDGVFKEHRKVSKKKLLDFLAKEYEEFRIVDVIGLDKENKAFNASLGTYHDLEKILDKDFLDNPDNESILEDIVQTLTLFEDREMIKKRLENYKDLFTESQLKKLYRRHYTGWGRLSAKLINGIRDKESQKTILDYLIDDGRSNRNFMQLINDDGLSFKSIISKAQAGSHSDNLKEVVGELAGSPAIKKGILQSLKIVDELVKVMGYEPEQIVVEMARENQTTNQGRRNSRQRYKLLDDGVKNLASNILKEYPTDNQALQNERLFLYYLQNGRDMYTGEALDIDNLSQYDIDHIIPQAFIKDDSIDNRVLVSSAKNRGKSDDVPSLEIVKDCKVFWKKLLDAKLMSQRKYDNLTKAERGGLTSDDKARFIQRQLVETRQITKHVARILDERFNNELDSKGRRIRKVKIVTLKSNLVSNFRKEFGFYKIREVNNYHHAHDAYLNAVVAKAILTKYPQLEPEFVYGDYPKYNSYKTRKATEKLFFYSNIMNFFKTKVTLADGTVVVKDDIEVNNDTGEIVWDKKKHFATVRKVLSYPQNNIVKKTEIQTGGFSKESILAHGNSDKLIPRKTKDIYLDPKKYGGFDSPIVAYSVLVVADIKKGKAQKLKTVTELLGITIMERSRFEKNPSAFLESKGYLNIRADKLIILPKYSLFELENGRRRLLASAGELQKGNELALPTQFMKFLYLASRYNESKGKPEEIEKKQEFVNQHVSYFDDILQLINDFSKRVILADANLEKINKLYQDNKENISVDELANNIINLFTFTSLGAPAAFKFFDKIVDRKRYTSTKEVLNSTLIHQSITGLYETRIDLGKLGED

SEQ ID NO: 47 - protein, 1369 aa, Streptococcus agalactiae
MNKPYSIGLDIGTNSVGWSIITDDYKVPAKKMRVLGNTDKEYIKKNLIGALLFDGGNTAADRRLKRTARRRYTRRRNRILYLQEIFAEEMSKVDDSFFHRLEDSFLVEEDKRGSKYPIFATLQEEKDYHEKFSTIYHLRKELADKKEKADLRLIYIALAHIIKFRGHFLIEDDSFDVRNTDISKQYQDFLEIFNTIFENNDLLSQNVDVEAILTDKISKSAKKDRILAQYPNQKSTGIFAEFLKLIVGNQADFKKYFNLEDKTPLQFAKDSYDEDLENLLGQIGDEFADLFSAAKKLYDSVLLSGILTVIDLSTKAPLSASMIQRYDEHREDLKQLKQFVKASLPEKYQEIFADSSKDGYAGYIEGKTNQEAFYKYLSKLLTKQEDSENFLEKIKNEDFLRKQRTFDNGSIPHQVHLTELKAIIRRQSEYYPFLKENQDRIEKILTFRIPYYIGPLAREKSDFAWMTRKTDDSIRPWNFEDLVDKEKSAEAFIHRMTNNDFYLPEEKVLPKHSLIYEKFTVYNELTKVRYKNEQGETYFFDSNIKQEIFDGVFKEHRKVSKKKLLDFLAKEYEEFRIVDVIGLDKENKAFNASLGTYHDLEKILDKDFLDNPDNESILEDIVQTLTLFEDREMIKKRLENYKDLFTESQLKKLYRRHYTGWGRLSAKLINGIRDKESQKTILDYLIDDGRSNRNFMQLINDDGLSFKSIISKAQAGSHSDNLKEVVGELAGSPAIKKGILQSLKIVDELVKVMGYEPEQIVVEMARENQTTNQGRRNSRQRYKLLDDGVKNLASNILKEYPTDNQALQNERLFLYYLQNGRDMYTGEALDIDNLSQYDIDHIIPQAFIKDDSIDNRVLVSSAKNRGKSDDVPSLEIVKDCKVFWKKLLDAKLMSQRKYDNLTKAERGGLTSDDKARFIQRQLVETRQITKHVARILDERFNNELDSKGRRIRKVKIVTLKSNLVSNFRKEFGFYKIREVNNYHHAHDAYLNAVVAKAILTKYPQLEPEFVYGDYPKYNSYKTRKATEKLFFYSNIMNFFKTKVTLADGTVVVKDDIEVNNDTGEIVWDKKKHFATVRKVLSYPQNNIVKKTEIQTGGFSKESILAHGNSDKLIPRKTKDIYLDPKKYGGFDSPIVAYSVLVVADIKKGKAQKLKTVTELLGITIMERSRFEKNPSAFLESKGYLNIRADKLIILPKYSLFELENGRRRLLASAGETIDRLQKGNELALPTQFMKFLYLASRYNESKGKPEEIEKKQEFVNQHVSYFDDILQLINDFSKRVILADANLEKINKLYQDNKENISVDELANNIINLFTFTSLGAPAAFKFFDKIVDRKRYTSTKEVLNSTLIHQSITGLYETRIDLGKLGED

SEQ ID NO: 48 - protein, 1363 aa, Streptococcus agalactiae
MNKPYSIGLDIGTNSVGWSIITDDYKVPAKKMRVLGNTDKEYIKKNLIGALLFDGGNTAADRRLKRTARRRYTRRRNRILYLQEIFAEEMSKVDDSFFHRLEDSFLVEEDKRGSKYPIFATLQEEKDYHEKFSTIYHLRKELADKKEKADLRLIYIALAHIIKFRGHFLIEDDSFDVRNTDISKQYQDFLEIFNTTFENNDLLSQNVDVEAILTDKISKSAKKDRILAQYPNQKSTGIFAEFLKLIVGNQADFKKYFNLEDKTPLQFAKDSYDEDLENLLGQIGDEFADLFSAAKKLYDSVLLSGILTVIDLSTKAPLSASMIQRYDEHREDLKQLKQFVKASLPEKYQEIFADSSKDGYAGYIEGKTNQEAFYKYLSKLLTKQEDSENFLEKIKNEDFLRKQRTFDNGSIPHQVHLTELKAIIRRQSEYYPFLKENQDRIEKILTFRIPYYIGPLAREKSDFAWMTRKTDDSIRPWNFEDLVDKEKSAEAFIHRMTNNDFYLPEEKVLPKHSLIYEKFTVYNELTKVRYKNEQGETYFFDSNIKQEIFDGVFKEHRKVSKKKLLDFLAKEYEEFRIVDVIGLDKENKAFNASLGTYHDLEKILDKDFLDNPDNESILEDIIQTLTLFEDREMIKKRLENYKDLFTESQLKKLYRRHYTGWGRLSAKLINGIRDKESQKTILDYLIDDGRSNRNFMQLINDDGLSFKSIISKAQAGSHSDNLKEVVGELAGSPAIKKGILQSLKIVDELVKVMGYEPEQIVVEMARENQTTNQGRRNSRQRYKLLDDGVKNLASNILKEYPTDNQALQNERLFLYYLQNGRDMYTGEALDIDNLSQYDIDHIIPQAFIKDDSIDNRVLVSSAKNRGKSDDVPSLEIVKDCKVFWKKLLDAKLMSQRKYDNLTKAERGGLTSKARFIQRQLVETRQITKHVARILDERFNNELDSKGRRIRKVKIVTLKSNLVSNFRKEFGFYKIREVNNYHHAHDAYLNAVVAKAILTKYPQLEPEFVYGDYPKYNSYKTRKATEKLFFYSNIMNFFKTKVTLADGTVVVKDDIEVNNDTGEIVWDKKKHFATVRKVLSYPQNNIVKKTEIQTGGFSKESILAHGNSDKLIPRKTKDIYLDPKKYGGFDSPIVAYSVLVVADIKKGKAQKLKTVTELLGITIMERSRFEKNPSAFLESKGYLNIRADKLIILPKYSLFELENGRRRLLASAGELQKGNELALPTQFMKFLYLASRYNESKGKPEEIEKKQEFVNQHVSYFDDILQLINDFSKRVILADANLEKINKLYQDNKENISVDELANNIINLFTFTSLGAPAAFKFFDKIVDRKRYTSTKEVLNSTLIHQSITGLYETRIDLGKLGED

SEQ ID NO: 49 - protein, 1365 aa, Streptococcus agalactiae
MNKPYSIGLDIGTNSVGWSIITDDYKVPAKKMRVLGNTDKEYIKKNLIGALLFDGGNTAADRRLKRTARRRYTRRRNRILYLQEIFAEEMSKVDDSFFHRLEDSFLVEEDKRGSKYPIFATLQEEKDYHEKFSTIYHLRKELADKKEKADLRLIYIALAHIIKFRGHFLIEDDSFDVRNTDISKQYQDFLEIFNTTFENNDLLSQNVDVEAILTDKISKSAKKDRILAQYPNQKSTGIFAEFLKLIVGNQADFKKYFNLEDKTPLQFAKDSYDEDLENLLGQIGDEFADLFSAAKKLYDSVLLSGILTVIDLSTKAPLSASMIQRYDEHREDLKQLKQFVKASLPEKYQEIFADSSKDGYAGYIEGKTNQEAFYKYLSKLLTKQEDSENFLEKIKNEDFLRKQRTFDNGSIPHQVHLTELKAIIRRQSEYYPFLKENQDRIEKILTFRIPYYIGPLAREKSDFAWMTRKTDDSIRPWNFEDLVDKEKSAEAFIHRMTNNDFYLPEEKVLPKHSLIYEKFTVYNELTKVRYKNEQGETYFFDSNIKQEIFDGVFKEHRKVSKKKLLDFLAKEYEEFRIVDVIGLDKENKAFNASLGTYHDLEKILDKDFLDNPDNESILEDIVQTLTLFEDREMIKKRLENYKDLFTESQLKKLYRRHYTGWGRLSAKLINGIRDKESQKTILDYLIDDGRSNRNFMQLINDDGLSFKSIISKAQAGSHSDNLKEVVGELAGSPAIKKGILQSLKIVDELVKVMGYEPEQIVVEMARENQTTNQGRRNSRQRYKLLDDGVKNLASNILKEYPTDNQALQNERLFLYYLQNGRDMYTGEALDIDDLSQYDIDHIIPQAFIKDDSIDNRVLVSSAKNRGKSDDVPSLEIVKDCKVFWKKLLDAKLMSQRKYDNLTKAERGGLTSDDKARFIQRQLVETRQITKHVARILDERFNNELDSKGRRIRKVKIVTLKSNLVSNFRKEFGFYKIREVNNYHHAHDAYLNAVVAKAILTKYPQLEPEFVYGDYPKYNSYKTRKATEKLFFYSNIMNFFKTKVTLADGTVVVKDDIEVNNDTGEIVWDKKKHFATVRKVLSYPQNNIVKKTEIQTGGFSKESILAHGNSDKLIPRKTKDIYLDPKKYGGFDSPIVAYSVLVVADIKKGKAQKLKTVTELLGITIMERSRFEKNPSAFLESKGYLNIRADKLIILPKYSLFELENGRRRLLASAGELQKGNELALPTQFMKFLYLASRYNESKGKPEEIEKKQEFVNQHVSYFDDILQLINDFSKRVILADANLEKINKLYQDNKENISVDELANNIINLFTFTSLGAPAAFKFFDKIVDRKRYTSTKEVLNSTLIHQSITGLYETRIDLGKLGED

SEQ ID NO: 50 - protein, 1365 aa, Streptococcus agalactiae
MNKPYSIGLDIGTNSVGWSIITDDYKVPAKKMRVLGNTDKEYIKKNLIGALLFDGGNTAADRRLKRTARRRYTRRRNRILYLQEIFAEEMSKVDDSFFHRLEDSFLVEEDKRGSKYPIFATLQEEKDYHEKFSTIYHLRKELADKKEKADLRLIYIALAHIIKFRGHFLIEDDSFDVRNTDISKQYQDFLEIFNTTFENNDLLSQNVDVEAILTDKISKSAKKDRILAQYPNQKSTGIFAEFLKLIVGNQADFKKYFNLEDKTPLQFAKDSYDEDLENLLGQIGDEFADLFSAAKKLYDSVLLSGILTVIDLSTKAPLSASMIQRYDEHREDLKQLKQFVKASLPEKYQEIFADSSKDGYAGYIEGKTNQEAFYKYLSKLLTKQEDSENFLEKIKNEDFLRKQRTFDNGSIPHQVHLTELKAIIRRQSEYYPFLKENQDRIEKILTFRIPYYIGPLAREKSDFAWMTRKTDDSIRPWNFEDLVDKEKSAEAFIHRMTNNDFYLPEEKVLPKHSLIYEKFTVYNELTKVRYKNEQGETYFFDSNIKQEIFDGVFKEHRKVSKKKLLDFLAKEYEEFRIVDVIGLDKENKAFNASLGTYHDLEKILDKDFLDNPDNESILEDIVQTLTLFEDREMIKKRLENYKDLFTESQLKKLYRRHYTGWGRLSAKLINGIRDKESQKTILDYLIDDGRSNRNFMQLINDDGLSFKSIISKAQAGSHSDNLKEVVGELAGSPAIKKGILQSLKIVDELVKVMGYEPEQIVVEMARENQTTNQGRRNSRQRYKLLDDGVKNLASNILKEYPTDNQALQNERLFLYYLQNGRDMYTGEALDIDNLSQYDIDHIIPQAFIKDDSIDNRVLVSSAKNRGKSDDVPSLEIVKDCKVFWKKLLDAKLMSQRKYDNLTKAERGGLTSDDKARFIQRQLVETRQITKHVARILDERFNNELDSKGRRIRKVKIVTLKSNLVSNFRKEFGFYKIREVNNYHHAHDAYLNAVVAKAILTKYPQLEPEFVYGDYPKYNSYKTRKATEKLFFYSNIMNFFKTKVTLADGTVVVKDDIEVNNDTGEIVWDKKKHFATVRKVLSYPQNNIVKKTEIQTGGFSKESILAHGNSDKLIPRKTKDIYLDPKKYGGFDSPIVAYSVLVVADIKKGKAQKLKTVTELLGITIMERSRFEKNPSAFLESKGYLNIRADKLIILPKYSLFELENGRRRLLASAGELQKGNELALPTQFMKFLYLASRYNESKGKPEEIEKKQEFVNQHVSYFDDILQLINDFSKRVILADANLEKINKLYQDNKENISVDELANNIINLFTFTSLGAPAAFKFFDKIVDRKRYTSTKEVLNSTLIHQSITGLYETRIDLGKLGED

SEQ ID NO: 51 - protein, 1365 aa, Streptococcus agalactiae
MNKPYSIGLDIGTNSVGWSIITDDYKVPAKKMRVLGNTDKEYIKKNLIGALLFDGGNTAADRRLKRTARRRYTRRRNRILYLQEIFAEEMSKVDDSFFHRLEDSFLVEEDKRGSKYPIFATLQEEKDYHEKFSTIYHLRKELADKKEKADLRLIYIALAHIIKFRGHFLIEDDSFDVRNTDISKQYQDFLEIFNTTFENNDLLSQNVDVEAILTDKISKSAKKDRILAQYPNQKSTGIFAEFLKLIVGNQADFKKYFNLEDKTPLQFAKDSYDEDLENLLGQIGDEFADLFSAAKKLYDSVLLSGILTVIDLSTKAPLSASMIQRYDEHREDLKQLKQFVKASLPEKYQEIFADSSKDGYAGYIEGKTNQEAFYKYLSKLLTKQEDSENFLEKIKNEDFLRKQRTFDNGSIPHQVHLTELKAIIRRQSEYYPFLKENQDRIEKILTFRIPYYIGPLAREKSDFAWMTRKTDDSIRPWNFEDLVDKEKSAEAFIHRMTNNDFYLPEEKVLPKHSLIYEKFTVYNELTKVRYKNEQGETYFFDSNIKQEIFDGVFKEHRKVSKKKLLDFLAKEYEEFRIVDVIGLDKENKAFNASLGTYHDLEKILDKDFLDNPDNESILEDIVQTLTLFEDREMIKKRLENYKDLFTESQLKKLYRRHYTGWGRLSAKLINGIRDKESQKTILDYLIDDGRSNRNFMQLINDDGLSFKSIISKAQAGSHSDNLKEVVGELAGSPAIKKGILQSLKIVDELVKVMGYEPEQIVVEMARENQTTNQGRRNSRQRYKLLDDGVKNLASNILKEYPTDNQALQNERLFLYYLQNGRDMYTGEALDIDNLSQYDIDHIIPQAFIKDDSIDNRVLVSSAKNRGKSDDVPSLEIVKDCKVFWKKLLDAKLMSQRKYDNLTKAERGGLTSDDKARFIQRQLVETRQITKHVARILDERFNNELDSKGRRIRKVKIVTLKSNLVSNFRKEFGFYKIREVNNYHHAHDAYLNAVVAKAILTKYPQLEPEFVYGDYPKYNSYKTRKATEKLFFYSNIMNFFKTKVTLADGTVVVKDDIEVNNDTGEIVWDKKKHFATVRKVLSYPQNNIVKKTEIQTGGFSKESILAHGNSDKLIPRKTKDIYLDPKKYGGFDSPIVAYSVLVVADIKKGKAQKLKTVTELLGITIMERSRFEKNPSAFLESKGYLNIRADKLIILPKYSLFELENGRRRLLASAGELQKGNELALPTQFMKFLYLASRYNESKGKPEEIEKKQEFVNQHVSYFDDILQLINDFSKRVILADANLEKINKLYQDNKENISVDELANNIINLFTFTSLGAPAAFKFFDKIVDRKRYTSTKEVLNSTLIHQSITGLYETRIDLGKLGGD

SEQ ID NO: 52 - protein, 1365 aa, Streptococcus agalactiae
MNKPYSIGLDIGTNSVGWSIITDDYKVPAKKMRVLGNTDKEYIKKNLIGALLFDGGNTAADRRLKRTARRRYTRRRNRILYLQEIFAEEMSKVDDSFFHRLEDSFLVEEDKRGSKYPIFATLQEEKDYHEKFSTIYHLRKELADKKEKADLRLIYIALAHIIKFRGHFLIEDDSFDVRNTDISKQYQDFLEIFNTTFENNDLLSQNVDVEAILTDKISKSAKKDRILAQYPNQKSTGIFAEFLKLIVGNQADFKKYFNLEDKTPLQFAKDSYDEDLENLLGQIGDEFADLFSAAKKLYDSVLLSGILTVIDLSTKAPLSASMIQRYDEHREDLKQLKQFVKASLPEKYQEIFADSSKDGYAGYIEGKTNQEAFYKYLSKLLTKQEDSENFLEKIKNEDFLRKQRTFDNGSIPHQVHLTELKAIIRRQSEYYPFLKENQDRIEKILTFRIPYYIGPLAREKSDFAWMTRKTDDSIRPWNFEDLVDKEKSAEAFIHRMTNNDFYLPEEKVLPKHSLIYEKFTVYNELTKVRYKNEQGETYFFDSNIKQEIFDGVFKEHRKVSKKKLLDFLAKEYEEFRIVDVIGLDKENKAFNASLGTYHDLEKILDKDFLDNPDNESILEDIVQTLTLFEDREMIKKRLENYKDLFTESQLKKLYRRHYTGWGRLSAKLINGIRDKESQKTILDYLIDDGRSNRNFMQLINDDGLSFKSIISKAQAGSHSDNLKEVVGELAGSPAIKKGILQSLKIVDELVKVMGYEPEQIVVEMARENQTTNQGRRNSRQRYKLLDDGVKNLASNILKEYPTDNQALQNERLFLYYLQNGRDMYTGEALDIDNLSQYDIDHIIPQAFIKDDSIDNRVLVSSAKNRGKSDDVPSLEIVKDCKVFWKKLLDAKLMSQRKYDNLTKAERGGLTSDDKARFIQRQLVETRQITKHVARILDERFNNELDSKGRRIRKVKIVTLKSNLVSNFRKEFGFYKIREVNNYHHAHDAYLNAVVAKAILTKYPQLEPEFVYGDYPKYNSYKTRKATEKLFFYSNIMNFFKTKVTLADGTVVVKDDIEVNNDTGEIVWDKKKHFATVRKVLSYPQNNIVKKTEIQTGGFSKESILAHGNSDKLIPRKTKDIYLDPKKYGGFDSPIVAYSVLVVADIKKGKAQKLKTVTELLGITIMERSRFEKNPSAFLESKGYLNIRDDKLMILPKYSLFELENGRRRLLASAGELQKGNELALPTQFMKFLYLASRYNESKGKPEEIEKKQEFVNQHVSYFDDILQLINDFSKRVILADANLEKINKLYQDNKENISVDELANNIINLFTFTSLGAPAAFKFFDKIVDRKRYTSTKEVLNSTLIHQSITGLYETRIDLGKLGED

SEQ ID NO: 53 - protein, 1365 aa, Streptococcus agalactiae
MNKPYSIGLDIGTNSVGWSIITDDYKVPAKKMRVLGNTDKEYIKKNLIGALLFDGGNTAADRRLKRTARRRYTRRRNRILYLQEIFAEEMSKVDDSFFHRLEDSFLVEEDKRGSKYPIFATLQEEKDYHEKFSTIYHLRKELADKKEKADLRLIYIALAHIIKFRGHFLIEDDSFDVRNTDISKQYQDFLEIFNTTFENNDLLSQNVDVEAILTDKISKSAKKDRILAQYPNQKSTGIFAEFLKLIVGNQADFKKYFNLEDKTPLQFAKDSYDEDLENLLGQIGDEFADLFSAAKKLYDSVLLSGILTVIDLSTKAPLSASMIQRYDEHREDLKQLKQFVKASLPEKYQEIFADSSKDGYAGYIEGKTNQEAFYKYLSKLLTKQEDSENFLEKIKNEDFLRKQRTFDNGSIPHQVHLTELKAIIRRQSEYYPFLKENQDRIEKILTFRIPYYIGPLAREKSDFAWMTRKTDDSIRPWNFEDLVDKEKSAEAFIHRMTNNDFYLPEEKVLPKHSLIYEKFTVYNELTKVRYKNEQGETYFFDSNIKQEIFDGVFKEHRKVSKKKLLDFLAKEYEEFRIVDVIGLDKENKAFNASLGTYHDLEKILDKDFLDNPDNESILEDIVQTLTLFEDREMIKKRLENYKDLFTESQLKKLYRRHYTGWGRLSAKLINGIRDKESQKTILDYLIDDGRSNRNFMQLINDDGLSFKSIISKAQAGSHSDNLKEVVGELAGSPAIKKGILQSLKIVDELVKVVGYEPEQIVVEMARENQTTNQGRRNSRQRYKLLDDGVKNLASNILKEYPTDNQALQNERLFLYYLQNGRDMYTGEALDIDNLSQYDIDHIIPQAFIKDDSIDNRVLVSSAKNRGKSDDVPSLEIVKDCKVFWKKLLDAKLMSQRKYDNLTKAERGGLTSDDKARFIQRQLVETRQITKHVARILDERFNNELDSKGRRIRKVKIVTLKSNLVSNFRKEFGFYKIREVNNYHHAHDAYLNAVVAKAILTKYPQLEPEFVYGDYPKYNSYKTRKATEKLFFYSNIMNFFKTKVTLADGTVVVKDDIEVNNDTGEIVWDKKKHFATVRKVLSYPQNNIVKKTEIQTGGFSKESILAHGNSDKLIPRKTKDIYLDPKKYGGFDSPIVAYSVLVVADIKKGKAQKLKTVTELLGITIMERSRFEKNPSAFLESKGYLNIRADKLIILPKYSLFELENGRRRLLASAGELQKGNELALPTQFMKFLYLASRYNESKGKPEEIEKKQEFVNQHVSYFDDILQLINDFSKRVILADANLEKINKLYQDNKENISVDELANNIINLFTFTSLGAPAAFKFFDKIVDRKRYTSTKEVLNSTLIHQSITGLYETRIDLGKLGED

SEQ ID NO: 54 - protein, 1365 aa, Streptococcus agalactiae
MNKPYSIGLDIGTNSVGWSIITDDYKVPAKKMRVLGNTDKEYIKKNLIGALLFDGGNTAADRRLKRTARRRYTRRRNRILYLQEIFAEEMSKVDDSFFHRLEDSFLVEEDKRGSKYPIFATLQEEKDYHEKFSTIYHLRKELADKKEKADLRLIYIALAHIIKFRGHFLIEDDSFDVRNTDISKQYQDFLEIFNTTFENNDLLSQNVDVEAILTDKISKSAKKDRILAQYPNQKSTGIFAEFLKLIVGNQADFKKYFNLEDKTPLQFAKDSYDEDLENLLRQIGDEFADLFSAAKKLYDSVLLSGILTVIDLSTKAPLSASMIQRYDEHREDLKQLKQFVKASLPEKYQEIFADSSKDGYAGYIEGKTNQEAFYKYLSKLLTKQEDSENFLEKIKNEDFLRKQRTFDNGSIPHQVHLTELKAIIRRQSEYYPFLKENQDRIEKILTFRIPYYIGPLAREKSDFAWMTRKTDDSIRPWNFEDLVDKEKSAEAFIHRMTNNDFYLPEEKVLPKHSLIYEKFTVYNELTKVRYKNEQGETYFFDSNIKQEIFDGVFKEHRKVSKKKLLDFLAKEYEEFRIVDVIGLDKENKAFNASLGTYHDLEKILDKDFLDNPDNESILEDIVQTLTLFEDREMIKKRLENYKDLFTESQLKKLYRRHYTGWGRLSAKLINGIRDKESQKTILDYLIDDGRSNRNFMQLINDDGLSFKSIISKAQAGSHSDNLKEVVGELAGSPAIKKGILQSLKIVDELVKVMGYEPEQIVVEMARENQTTNQGRRNSRQRYKLLDDGVKNLASNILKEYPTDNQALQNERLFLYYLQNGRDMYTGEALDIDNLSQYDIDHIIPQAFIKDDSIDNRVLVSSAKNRGKSDDVPSLEIVKDCKVFWKKLLDAKLMSQRKYDNLTKAERGGLTSDDKARFIQRQLVETRQITKHVARILDERFNNELDSKGRRIRKVKIVTLKSNLVSNFRKEFGFYKIREVNNYHHAHDAYLNAVVAKAILTKYPQLEPEFVYGDYPKYNSYKTRKATEKLFFYSNIMNFFKTKVTLADGTVVVKDDIEVNNDTGEIVWDKKKHFATVRKVLSYPQNNIVKKTEIQTGGFSKESILAHGNSDKLIPRKTKDIYLDPKKYGGFDSPIVAYSVLVVADIKKGKAQKLKTVTELLGITIMERSRFEKNPSAFLESKGYLNIRADKLIILPKYSLFELENGRRRLLASAGELQKGNELALPTQFMKFLYLASRYNESKGKPEEIEKKQEFVNQHVSYFDDILQLINDFSKRVILADANLEKINKLYQDNKENISVDELANNIINLFTFTSLGAPAAFKFFDKIVDRKRYTSTKEVLNSTLIHQSITGLYETRIDLGKLGED

SEQ ID NO: 55 - protein, 1365 aa, Streptococcus agalactiae
MNKPYSIGLDIGTNSVGWSIITDDYKVPAKKMRVLGNTDKEYIKKNLIGALLFDGGNTAADRRLKRTARRRYTRRRNRILYLQEIFAEEMSKVDDSFFHRLEDSFLVEEDKRGSKYPIFATMQEEKDYHEKFPTIYHLRKELADKKEKADLRLVYLALAHIIKFRGHFLIEDDRFDVRNTDIQKQYQAFLEIFDTSFENNHLLSQNVDVEAILTDKISKSAKKDRILAQYPNQKSTGIFAEFLKLIVGNQADFKKHFNLEDKTPLQFAKDSYDEDLENLLGQIGDEFADLFSAAKKLYDSVLLSGILTVTDLSTKAPLSAYMIQRYDEHREDLKQLKQFVKASLPEKYQEIFADSSKDGYAGYIEGKTNQEAFYKYLSKLLTKQEDSEYFLEKIKNEDFLRKQRTFDNGSIPHQVHLTELKAIIRRQSEYYPFLKENQDKIEKILTFRIPYYVGPLARGNSDFAWMTRKTDDSIRPWNFEDLVDKEKSAEAFIHRMTNNDLYLPEEKVLPKHSLIYEKFTVYNELTKVRYKNEQGETYFFDSNVKQEIFDGVFKEHRKVSKKQLLDFLAKEFEEFRIVDVTGLDKENKAFNASLGTYHDLKKILDKDFLDNPDNESILEDIVQTITLFEDREMIKKRLENYKDLFTESQLKKLYRRHYTGWGRLSAKLINGIRDRESQKTILDYLISDGRANRNFMQLINDDGLSFKSIISKAQSGSHSDNLKEVVGELAGSPAIKKGILQSLKIVDELVKVMGYEPEQIVVEMARENQTTNQGRRNSRQRYKLLEDGVKNLASDILKEYPTDNQALQNERLFLYYLQNGRDMYTGEALDIDNLSQYDIDHIVPQAFIKDDSIDNRVLVSSAKNRGKSDDVPSIDIVKARKAFWKKLLDAKLISQRKYDNLTKAERGGLTPDDKAGFIQRQLVETRQITKHVARILDERFNNKVDDNNKPIRKVKIVTLKSNLVSNFRKEFGFYKIREVNNYHHAHDAYLNAVVAKAILTKYPQLEPEFVYGDYPKYNSYKTRKATEKLFFYSNIMNFFKTKVTLADETVVVKDDIEVNNETGEIAWDKKKHFATVRKVLSYPQVNIVKKTEVQTGGFSKESILAHSNSDKLIPRKTKDIYLDPKKYGGFDSPIVAYSVLVLADIKKGKAQKLKTVKELIGITIMERERFEKNPSAFLESKGYLNIRTDKLIILPKYSLFELENGRRRLLASAGELQKGNELALPTQYMKFLYLASRYNESKGKPEEIEKKQEFVNQHISYFDDILQLINDFSKRVILADANLEKINKLYSDNKDNTPVDELAKNIINLFTFTSLGAPAAFKFFDKSVDRKRYTSTKEVLDSTLIHQSITGLYETRIDLGKLGED

SEQ ID NO: 56 - protein, 1365 aa, Streptococcus agalactiae
MNKPYSIGLDIGTNSVGWSIITDDYKVPAKKMRVLGNTDKEYIKKNLIGALLFDGGNTAADRRLKRTARRRYTRRRNRILYLQEIFAEEMSKVDDSFFHRLEDSFLVEEDKRGSKYPIFATMQEEKYYHEKFPTIYHLRKELADKKEKADLRLIYLALAHIIKFRGHFLIEDDRFDVRNTDIQKQYQAFLEIFDTTFENNDLLSQNVDVEAILTDKISKSAKKDRILARYPNQKSTGIFAEFLKLIVGNQADFKKHFNLEDKTPLQFAKDSYDEDLENLLGQIGDEFADLFSAAKKLYDSVLLSGILTVTDLSTKAPLSASMIQHYDEHREDLKQLKQFVKASLPEKYQEIFADSSKDGYAGYIEGKTNQEAFYKYLSKLLTKQEGSEYLLEKIKNEDFLRKQRTFDNGSIPHQVHLTELRAIIRRQSEYYPFLKENLDRIEKILTFRIPYYVGPLAREKSDFAWMTRKTDDSIRPWNFEDLVDKEKSAEAFIHRMTNNDLYLPEEKVLPKHSLIYEKFTVYNELTKVRFLAEGFKDFQFLNRKQKETIFNSLFKEKRKVTEKDIISFLNKVDGYEGIAIKGIEKQFNASLSTYHDLKKILGKDFLDNTDNELILEDIVQTLTLFEDREMIRKRLDIYKDFFTESQLKKLYRRHYTGWGRLSAKLINGIRNKENQKTILDYLIDDGSANRNFMQLIKDAGLSFKPIIDKARTGSHSDNLKEVVGELAGSPAIKKGILQSLKIVDELVKVMGYEPEQIVVEMARENQTTAKGLSRSRQRLTTLRESLANLKSEKKPKYVKDQVENHHLSDDRLFLYYLQNGKDMYTDDELDIDNLSQYDIDHIIPQAFIKDDSIDNRVLVSSAKNRGKSDDVPSVEIVKDCKVFWKKLLDAKLMSQRKYDNLTKAERGGLTSDDKARFIQRQLVETRQITKHVARILDERFNNELDSKGRRIRKVKIVTLKSNLVSNFRKEFGFYKIREVNNYHHAHDAYLNAVVAKAILTKYPQLEPEFVYGDYPKYNSYKTRKATEKLFFYSNIMNFFKTKVTLADGTVVVKDDIEVNNDTGEIVWDKKKHFATVRKVLSYPQVNIVKKTEIQTGGFSKESILAHGNSDKLIPRKTKDIYLDPKKYGGFDSPIVAYSVLVVADIKKGKAQKLKTVTELLGITIMERSRFEKNPSAFLESKGYLNIRDDKLMILPKYSLFELENGRRRLLASAGELQKGNELALPTQFMKFLYLASRYNELKGKPEEIEQKQEFVVQHVSYFDDILQIINDFSNRVILADANLEKINKLYQDNKENIPVDELANNIINLFTFTSLGAPAAFKFFDKIVDRKRYTSTKEVLNSTLIHQSITGLYETRIDLGKLGED

SEQ ID NO: 57 - protein, 1365 aa, Streptococcus agalactiae
MNKPYSIGLDIGTNSVGWSIITDDYKVPAKKMRVLGNTDKEYIKKNLIGALLFDGGNTAADRRLKRTARRRYTRRRNRILYLQEIFAEEMSKVDDSFFHRLEDSFLVEEDKRGSKYPIFATMQEEKYYHEKFPTIYHLRKELADKKEKADLRLIYLALAHIIKFRGHFLIEDDRFDVRNTDIQKQYQAFLEIFDTTFENNDLLSQNVDVEAILTDKISKSAKKDRILARYPNQKSTGIFAEFLKLIVGNQADFKKHFNLEDKTPLQFAKDSYDEDLENLLGQIGDEFADLFSAAKKLYDSVLLSGILTVTDLSTKAPLSASMIQRYDEHREDLKQLKQFVKASLPEKYQEIFADSSKDGYAGYIEGKTNQEAFYKYLSKLLTKQEGSEYLLEKIKNEDFLRKQRTFDNGSIPHQVHLTELRAIIRRQSEYYPFLKENLDRIEKILTFRIPYYVGPLAREKSDFAWMTRKTDDSIRPWNFEDLVDKEKSAEAFIHRMTNNDLYLPEEKVLPKHSLIYEKFTVYNELTKVRFLAEGFKDFQFLNRKQKETIFNSLFKEKRKVTEKDIISFLNKVDGYEGIAIKGIEKQFNASLSTYHDLKKILGKDFLDNTDNELILEDIVQTLTLFEDREMIRKRLDIYKDFFTESQLKKLYRRHYTGWERLSAKLINGIRNKENQKTILDYLIDDGSANRNFMQLIKDAGLSFKPIIDKARTGSHLDNLKEVVGELAGSPAIKKGILQSLKIVDELVKVMGYEPEQIVVEMARENQTTAKGLSRSRQRLTTLRESLANLKSEKKPKYVKDQVENHHLSDDRLFLYYLQNGKDMYTDDELDIDNLSQYDIDHIIPQAFIKDDSIDNRVLVSSAKNRGKSDDVPSLEIVKDCKVFWKKLLDAKLMSQRKYDNLTKAERGGLTSDDKARFIQRQLVETRQITKHVARILDERFNNELDSKGRRIRKVKIVTLKSNLVSNFRKEFGFYKIREVNNYHHAHDAYLNAVVAKAILTKYPQLEPEFVYGDYPKYNSYKTRKATEKLFFYSNIMNFFKTKVTLADGTVVVKDDIEVNNDTGEIVWDKKKHFATVRKVLSYPQVNIVKKTEVQTGGFSKESILAHGNSDKLIPRKTKDIYLDPKKYGGFDSPIVAYSVLVVADIKKGKAQKLKTVTELLGITIMERSRFEKNPSAFLESKGYLNIRTDKLIILPKYSLFELENGRRRLLASAGELQKGNELALPTQYMKFLYLASRYNELKGKPEEIEQKQEFVVQHVSYFDDILQIINDFSNRVILADANLEKINKLYQDNKENIPVDELANNIINLFTFTSLGAPAAFKFFDKIVDRKRYTSTKEVLNSTLIHQSITGLYETRIDLGKLGEG

SEQ ID NO: 58 - protein, 1365 aa, Streptococcus agalactiae
MNKPYSIGLDIGTNSVGWSIITDDYKVPAKKMRVLGNTDKEYIKKNLIGALLFDGGNTAADRRLKRTARRRYTRRRNRILYLQEIFAEEMSKVDDSFFHRLEDSFLVEEDKRGSKYPIFATMQEEKYYHEKFPTIYHLRKELADKKEKADLRLIYLALAHIIKFRGHFLIEDDRFDVRNTDIQKQYQAFLEIFDTTFENNDLLSQNVDVEAILTDKISKSAKKDRILARYPNQKSTGIFAEFLKLIVGNQADFKKHFNLEDKTPLQFAKDSYDEDLENLLGQIGDEFADLFSAAKKLYDSVLLSGILTVTDLSTKAPLSASMIQRYDEHREDLKQLKQFVKASLPEKYQEIFADSSKDGYAGYIEGKTNQEAFYKYLSKLLTKQEGSEYLLEKIKNEDFLRKQRTFDNGSIPHQVHLTELRAIIRRQSEYYPFLKENLDRIEKILTFRIPYYVGPLAREKSDFAWMTRKTDDSIRPWNFEDLVDKEKSAEAFIHRMTNNDLYLPEEKVLPKHSLIYEKFTVYNELTKVRFLAEGFKDFQFLNRKQKETIFNSLFKEKRKVTEKDIISFLNKVDGYEGIAIKGIEKQFNASLSTYHDLKKILGKDFLDNTDNELILEDIVQTLTLFEDREMIRKRLDIYKDFFTESQLKKLYRRHYTGWGRLSAKLINGIRNKENQKTILDYLIDDGSANRNFMQLIKDAGLSFKPIIDKARTGSHLDNLKEVVGELAGSPAIKKGILQSLKIVDELVKVMGYEPEQIVVEMARENQTTAKGLSRSRQRLTTLRESLANLKSEKKPKYVKDQVENHHLSDDRLFLYYLQNGKDMYTDDELDIDNLSQYDIDHIIPQAFIKDDSIDNRVLVSSAKNRGKSDDVPSLEIVKDCKVFWKKLLDAKLMSQRKYDNLTKAERGGLTSDDKARFIQRQLVETRQITKHVARILDERFNNELDSKGRRIRKVKIVTLKSNLVSNFRKEFGFYKIREVNNYHHAHDAYLNAVVAKAILTKYPQLEPEFVYGDYPKYNSYKTRKATEKLFFYSNIMNFFKTKVTLADGTVVVKDDIEVNNDTGEIVWDKKKHFATVRKVLSYPQVNIVKKTEVQTGGFSKESILAHGNSDKLIPRKTKDIYLDPKKYGGFDSPIVAYSVLVVADIKKGKAQKLKTVTELLGITIMERSRFEKNPSAFLESKGYLNIRTDKLIILPKYSLFELENGRRRLLASAGELQKGNELALPTQYMKFLYLASRYNELKGKPEEIEQKQEFVVQHVSYFDDILQIINDFSNRVILADANLEKINKLYQDNKENIPVDELANNIINLFTFTSLGAPAAFKFFDKIVDRKRYTSTKEVLNSTLIHQSITGLYETRIDLGKLGEG

SEQ ID NO: 59 - protein, 1365 aa, Streptococcus agalactiae
MNKPYSIGLDIGTNSVGWSIITDDYKVPAKKMRVLGNTDKEYIKKNLIGALLFDGGNTAADRRLKRTARRRYTRRRNRILYLQEIFAEEMSKVDDSFFHRLEDSFLVEEDKRGSKYPIFATMQEEKYYHEKFPTIYHLRKELADKKEKADLRLIYLALAHIIKFRGHFLIEDDRFDVRNTDIQKQYQAFLEIFDTTFENNDLLSQNVDVEAILTDKISKSAKKDRILARYPNQKSTGIFAEFLKLIVGNQADFKKHFNLEDKTPLQFAKDSYDEDLENLLGQIGDEFADLFSAAKKLYDSVLLSGILTVTDLSTKAPLSASMIQRYDEHREDLKQLKQFVKASLPEKYQEIFADSSKDGYAGYIEGKTNQEAFYKYLSKLLTKQEGSEYLLEKIKNEDFLRKQRTFDNGSIPHQVHLTELRAIIRRQSEYYPFLKENLDRIEKILTFRIPYYVGPLAREKSDFAWMTRKTDDSIRPWNFEDLVDKEKSAEAFIHRMTNNDLYLPEEKVLPKHSLIYEKFTVYNELTKVRFLAEGFKDFQFLNRKQKETIFNSLFKEKRKVTEKDIISFLNKVDGYEGIAIKGIEKQFNASLSTYHDLKKILGKDFLDNTDNELILEDIVQTLTLFEDREMIRKRLDIYKDFFTESQLKKLYRRHYTGWGRLSAKLINGIRNKENQKTILDYLIDDGSANRNFMQLIKDAGLSFKPIIDKARTGSHSDNLKEVVGELAGSPAIKKGILQSLKIVDELVKVMGYEPEQIVVEMARENQTTAKGLSRLRQRLTTLRESLANLKSEKKPKYVKDQVENHHLSDDRLFLYYLQNGKDMYTDDELDIDNLSQYDIDHIIPQAFIKDDSIDNRVLVSSAKNRGKSDDVPSVEIVKDCKVFWKKLLDAKLMSQRKYDNLTKAERGGLTSDDKARFIQRQLVETRQITKHVARILDERFNNELDSKGRRIRKVKIVTLKSNLVSNFRKEFGFYKIREVNNYHHAHDAYLNAVVAKAILTKYPQLEPEFVYGDYPKYNSYKTRKATEKLFFYSNIMNFFKTKVTLADGTVVVKDDIEVNNDTGEIVWDKKKHFATVRKVLSYPQVNIVKKTEIQTGGFSKESILAHGNSDKLIPRKTKDIYLDPKKYGGFDSPIVAYSVLVVADIKKGKAQKLKTVTELLGITIMERSRFEKNPSAFLESKGYLNIRDDKLMILPKYSLFELENGRRRLLASADELQKGNELALPTQFMKFLYLASRYNELKGKPEEIEQKQEFVVQHVSYFDDILQIINDFSNRVILADANLEKINKLYQDNKENIPVDELANNIINLFTFTSLGAPAAFKFFDKIVDRKRYTSTKEVLNSTLIHQSITGLYETRIDLGKLGED

SEQ ID NO: 60 - protein, 1365 aa, Streptococcus agalactiae
MNKPYSIGLDIGTNSVGWSIITDDYKVPAKKMRVLGNTDKEYIKKNLIGALLFDGGNTAADRRLKRTARRRYTRRRNRILYLQEIFAEEMSKVDDSFFHRLEDSFLVEEDKRGSKYPIFATMQEEKYYHEKFPTIYHLRKELADKKEKADLRLIYLALAHIIKFRGHFLIEDDRFDVRNTDIQKQYQAFLEIFDTTFENNDLLSQNVDVEAILTDKISKSAKKDRILARYPNQKSTGIFAEFLKLIVGNQADFKKHFNLEDKTPLQFAKDSYDEDLENLLGQIGDEFADLFSAAKKLYDSVLLSGILTVTDLSTKAPLSASMIQRYDEHREDLKQLKQFVKASLPEKYQEIFADSSKDGYAGYIEGKTNQEAFYKYLSKLLTKQEGSEYLLEKIKNEDFLRKQRTFDNGSIPHQVHLTELRAIIRRQSEYYPFLKENLDRIEKILTFRIPYYVGPLAREKSDFAWMTRKTDDSIRPWNFEDLVDKEKSAEAFIHRMTNNDLYLPEEKVLPKHSLIYEKFTVYNELTKVRFLAEGFKDFQFLNRKQKETIFNSLFKEKRKVTEKDIISFLNKVDGYEGIAIKGIEKQFNASLSTYHDLKKILGKDFLDNTDNELILEDIVQTLTLFEDREMIRKRLDIYKDFFTESQLKKLYRRHYTGWGRLSAKLINGIRNKENQKTILDYLIDDGSANRNFMQLIKDAGLSFKPIIDKARTGSHSDNLKEVVGELAGSPAIKKGILQSLKIVDELVKVMGYEPEQIVVEMARENQTTAKGLSRSRQRLTTLRESLANLKSEKKPKYVKDQVENHHLSDDRLFLYYLQNGKDMYTDDELDIDNLSQYDIDHIIPQAFIKDDSIDNRVLVSSAKNRGKSDDVPSVEIVKDCKVFWKKLLDAKLMSQRKYDNLTKAERGGLTSDDKARFIQRQLVETRQITKHVARILDERFNNELDSKGRRIRKVKIVTLKSNLVSNFRKEFGFYKIREVNNYHHAHDAYLNAVVAKAILTKYPQLEPEFVYGDYPKYNSYKTRKATEKLFFYSNIMNFFKTKVTLADGTVVVKDDIEVNNDTGEIVWDKKKHFATVRKVLSYPQVNIVKKTEIQTGGFSKESILAHGNSDKLIPRKTKDIYLDPKKYGGFDSPIVAYSVLVVADIKKGKAQKLKTVTELLGITIMERSRFEKNPSAFLESKGYLNIRDDKLMILPKYSLFELENGRRRLLASAGELQKGNELALPTQFMKFLYLASRYNELKGKPEEIEQKQEFVVQHVSYFDDILQIINDFSNRVILADANLEKINKLYQDNKENIPVDELANNIINLFTFTSLGAPAAFKFFDKIVDRKRYTSTKEVLNSTLIHQSITGLYETRIDLGKLGED

SEQ ID NO: 61 - protein, 1365 aa, Streptococcus agalactiae
MNKPYSIGLDIGTNSVGWSIITDDYKVPAKKMRVLGNTDKEYIKKNLIGALLFDGGNTAADRRLKRTARRRYTRRRNRILYLQEIFAEEMSKVDDSFFHRLEDSFLVEEDKRGSKYPIFATMQEEKYYHEKFPTIYHLRKELADKKEKADLRLIYLALAHIIKFRGHFLIEDDRFDVRNTDIQKQYQAFLEIFDTTFENNDLLSQNVDVEAILTDKISKSAKKDRILARYPNQKSTGIFAEFLKLIVGNQADFKKHFNLEDKTPLQFAKDSYDEDLENLLGQIGDEFADLFSAAKKLYDSVLLSGILTVTDLSTKAPLSASMIQRYDEHREDLKQLKQFVKASLPEKYQEIFADSSKDGYAGYIEGKTNQEAFYKYLSKLLTKQEGSEYLLEKIKNEDFLRKQRTFDNGSIPHQVHLTELRAIIRRQSEYYPFLKENLDRIEKILTFRIPYYVGPLAREKSDFAWMTRKTDDSIRPWNFEDLVDKEKSAEAFIHRMTNNDLYLPEEKVLPKHSLIYEKFTVYNELTKVRFLAEGFKDFQFLNRKQKETIFNSLFKEKRKVTEKDIISFLNKVDGYEGIAIKGIEKQFNASLSTYHDLKKILGKDFLDNTDNELILEDIVQTLTLFEDREMIRKRLDIYKDFFTESQLKKLYRRHYTGWGRLSAKLINGIRNKENQKTILDYLIDDGSANRNFMQLIKDAGLSFKPIIDKARTGSHSDNLKEVVGELAGSPAIKKGILQSLKIVDELVKVMGYEPEQIVVEMARENQTTAKGLSRSRQRLTTLRESLANLKSEKKPKYVKDQVENHHLSDDRLFLYYLQNGKDMYTDDELDIDNLSQYDIDHIIPQAFIKDDSIDNRVLVSSAKNRGKSDDVPSVEIVKDCKVFWKKLLDAKLMSQRKYDNLTKAERGGLTSDDKARFIQRQLVETRQITKHVARILDERFNNELDSKGRRIRKVKIVTLKSNLVSNFRKEFGFYKIREVNNYHHAHDAYLNAVVAKAILTKYPQLEPEFVYGDYPKYNSYKTRKATEKLFFYSNIMNFFKTKVTLADGTVVVKDDIEVNNDTGEIVWDKKKHFATVRKVLSYPQVNIVKKTEIQTGGFSKESILAHGNSDKLIPRKTKDIYLDPKKYGGFDSPKVAYSVLVVADIKKGKAQKLKTVTELLGITIMERSRFEKNPSAFLESKGYLNIRDDKLMILPKYSLFELENGRRRLLASAGELQKGNELALPTQFMKFLYLASRYNELKGKPEEIEQKQEFVVQHVSYFDDILQIINDFSNRVILADANLEKINKLYQDNKENIPVDELANNIINLFTFTSLGAPAAFKFFDKIVDRKRYTSTKEVLNSTLIHKSITGLYETRIDLGKLGED

SEQ ID NO: 62 - protein, 1365 aa, Streptococcus agalactiae
MNKPYSIGLDIGTNSVGWSIITDDYKVPAKKMRVLGNTDKEYIKKNLIGALLFDGGNTAADRRLKRTARRRYTRRRNRILYLQEIFAEEMSKVDDSFFHRLEDSFLVEEDKRGSKYPIFATMQEEKYYHEKFPTIYHLRKELADKKEKADLRLIYLALAHIIKFRGHFLIEDDRFDVRNTDIQKQYQAFLEIFDTTFENNDLLSQNVDVEAILTDKISKSAKKDRILARYPNQKSTGIFAEFLKLIVGNQADFKKHFNLEDKTPLQFAKDSYDEDLENLLGQIGDEFADLFSAAKKLYDSVLLSGILTVTDLSTKAPLSASMIQRYDEHREDLKQLKQFVKASLPEKYQEIFADSSKDGYAGYIEGKTNQEAFYKYLSKLLTKQEGSEYLLEKIKNEDFLRKQRTFDNGSIPHQVHLTELRAIIRRQSEYYPLLKENLDRIEKILTFRIPYYVGPLAREKSDFAWMTRKTDDSIRPWNFEDLVDKEKSAEAFIHRMTNNDLYLPEEKVLPKHSLIYEKFTVYNELTKVRFLAEGFKDFQFLNRKQKETIFNSLFKEKRKVTEKDIISFLNKVDGYEGIAIKGIEKQFNASLSTYHDLKKILGKDFLDNTDNELILEDIVQTLTLFEDREMIRKRLDIYKDFFTESQLKKLYRRHYTGWGRLSAKLINGIRNKENQKTILDYLIDDGSANRNFMQLIKDAGLSFKPIIDKARTGSHSDNLKEVVGELAGSPAIKKGILQSLKIVDELVKVMGYEPEQIVVEMARENQTTAKGLSRSRQRLTTLRESLANLKSEKKPKYVKDQVENHHLSDDRLFLYYLQNGKDMYTDDELDIDNLSQYDIDHIIPQAFIKDDSIDNRVLVSSAKNRGKSDDVPSVEIVKDCKVFWKKLLDAKLMSQRKYDNLTKAERGGLTSDDKARFIQRQLVETRQITKHVARILDERFNNELDSKGRRIRKVKIVTLKSNLVSNFRKEFGFYKIREVNNYHHAHDAYLNAVVAKAILTKYPQLEPEFVYGDYPKYNSYKTRKATEKLFFYSNIMNFFKTKVTLADGTVVVKDDIEVNNDTGEIVWDKKKHFATVRKVLSYPQVNIVKKTEIQTGGFSKESILAHGNSDKLIPRKTKDIYLDPKKYGGFDSPIVAYSVLVVADIKKGKAQKLKTVTELLGITIMERSRFEKNPSAFLESKGYLDIRDDKLMILPKYSLFELENGRRRLLASAGELQKGNELALPTQFMKFLYLASRYNELKGKPEEIEQKQEFVVQHVSYFDDILQIINDFSNRVILADANLEKINKLYQDNKENIPVDELANNIINLFTFTSLGAPAAFKFFDKIVDRKRYTSTKEVLNSTLIHQSITGLYETRIDLGKLGED

SEQ ID NO: 63 - protein, 1365 aa, Streptococcus agalactiae
  misc_feature (117)..(117): Xaa can be any naturally occurring amino acid
MNKPYSIGLDIGTNSVGWSIITDDYKVPAKKMRVLGNTDKEYIKKNLIGALLFDGGNTAADRRLKRTARRRYTRRRNRILYLQEIFAEEMSKVDDSFFHRLEDSFLVEEDKRGSKYXIFATLQEEKDYHEKFSTIYHLRKELADKKEKADLRLIYIALAHIIKFRGHFLIEDDSFDVRNTDISKQYQDFLEIFNTTFENNDLLSQNVDVEAILTDKISKSAKKDRILAQYPNQKSTGIFAEFLKLIVGNQADFKKYFNLEDKTPLQFAKDSYDEDLENLLGQIGDEFADLFSAAKKLYDSVLLSGILTVIDLSTKAPLSASMIQRYDEHREDLKQLKQFVKASLPEKYQEIFADSSKDGYAGYIEGKTNQEAFYKYLSKLLTKQEDSENFLEKIKNEDFLRKQRTFDNGSIPHQVHLTELKAIIRRQSEYYPFLKENQDRIEKILTFRIPYYIGPLAREKSDFAWMTRKTDDSIRPWNFEDLVDKEKSAEAFIHRMTNNDFYLPEEKVLPKHSLIYEKFTVYNELTKVRYKNEQGETYFFDSNIKQEIFDGVFKEHRKVSKKKLLDFLAKEYEEFRIVDVIGLDKENKAFNASLGTYHDLEKILDKDFLDNPDNESILEDIVQTLTLFEDREMIKKRLENYKDLFTESQLKKLYRRHYTGWGRLSAKLINGIRDKESQKTILDYLIDDGRSNRNFMQLINDDGLSFKSIISKAQAGSHSDNLKEVVGELAGSPAIKKGILQSLKIVDELVKVMGYEPEQIVVEMARENQTTNQGRRNSRQRYKLLDDGVKNLASNILKEYPTDNQALQNERLFLYYLQNGRDMYTGEALDIDNLSQYDIDHIIPQAFIKDDSIDNRVLVSSAKNRGKSDDVPSLEIVKDCKVFWKKLLDAKLMSQRKYDNLTKAERGGLTSDDKARFIQRQLVETRQITKHVARILDERFNNELDSKGRRIRKVKIVTLKSNLVSNFRKEFGFYKIREVNNYHHAHDAYLNAVVAKAILTKYPQLEPEFVYGDYPKYNSYKTRKATEKLFFYSNIMNFFKTKVTLADGTVVVKDDIEVNNDTGEIVWDKKKHFATVRKVLSYPQNNIVKKTEIQTGGFSKESILAHGNSDKLIPRKTKDIYLDPKKYGGFDSPIVAYSVLVVADIKKGKAQKLKTVTELLGITIMERSRFEKNPSAFLESKGYLNIRADKLIILPKYSLFELENGRRRLLASAGELQKGNELALPTQFMKFLYLASRYNESKGKPEEIEKKQEFVNQHVSYFDDILQLINDFSKRVILADANLEKINKLYQDNKENISVDELANNIINLFTFTSLGAPAAFKFFDKIVDRKRYTSTKEVLNSTLIHQSITGLYETRIDLGKLGED

SEQ ID NO: 64 - protein, 1365 aa, Streptococcus agalactiae
MNKPYSIGLDIGTNSVGWSIITDDYKVPAKKMRVLGNTDKEYIKKNLIGALLFDGGNTAADRRLKRTSRRRYTRRRNRILYLQEIFAEEMSKVDDSFFHRLEDSFLVEEDKRGSKYPIFATLQEEKDYHEKFSTIYHLRKELADKKEKADLRLIYIALAHIIKFRGHFLIEDDSFDVRNTDISKQYQDFLEIFNTTFENNDLLSQNVDVEAILTDKISKSAKKDRILAQYPNQKSTGIFAEFLKLIVGNQADFKKYFNLEDKTPLQFAKDSYDEDLENLLGQIGDEFADLFSAAKKLYDSVLLSGILTVIDLSTKAPLSASMIQRYDEHREDLKQLKQFVKASLPEKYQEIFADSSKDGYAGYIEGKTNQEAFYKYLSKLLTKQEDSENFLEKIKNEDFLRKQRTFDNGSIPHQVHLTELKAIIRRQSEYYPFLKENQDRIEKILTFRIPYYIGPLAREKSDFAWMTRKTDDSIRPWNFEDLVDKEKSAEAFIHRMTNNDFYLPEEKVLPKHSLIYEKFTVYNELTKVRYKNEQGETYFFDSNIKQEIFDGVFKEHRKVSKKKLLDFLAKEYEEFRIVDVIGLDKENKAFNASLGTYHDLEKILDKDFLDNPDNESILEDIVQTLTLFEDREMIKKRLENYKDLFTESQLKKLYRRHYTGWGRLSAKLINGIRDKESQKTILDYLIDDGRSNRNFMQLINDDGLSFKSIISKAQAGSHSDNLKEVVGELAGSPAIKKGILQSLKIVDELVKVMGYEPEQIVVEMARENQTTNQGRRNSRQRYKLLDDGVKNLASNILKEYPTDNQALQNERLFLYYLQNGRDMYTGEALDIDNLSQYDIDHIIPQAFIKDDSIDNRVLVSSAKNRGKSDDVPSLEIVKDCKVFWKKLLDAKLMSQRKYDNLTKAERGGLTSDDKARFIQRQLVETRQITKHVARILDERFNNELDSKGRRIRKVKIVTLKSNLVSNFRKEFGFYKIREVNNYHHAHDAYLNAVVAKAILTKYPQLEPEFVYGDYPKYNSYKTRKATEKLFFYSNIMNFFKTKVTLADGTVVVKDDIEVNNDTGEIVWDKKKHFATVRKVLSYPQNNIVKKTEIQTGGFSKESILAHGNSDKLIPRKTKDIYLDPKKYGGFDSPIVAYSVLVVADIKKGKAQKLKTVTELLGITIMERSRFEKNPSAFLESKGYLNIRADKLIILPKYSLFELENGRRRLLASAGELQKGNELALPTQFMKFLYLASRYNESKGKPEEIEKKQEFVNQHVSYFDDILQLINDFSKRVILADANLEKINKLYQDNKENISVDELANNIINLFTFTSLGAPAAFKFFDKIVDRKRYTSTKEVLNSTLIHQSITGLYETRIDLGKLGED

SEQ ID NO: 65 - protein, 1365 aa, Streptococcus agalactiae
MNKPYSIGLDIGTNSVGYSVVTDDYKVPAKKMRVLGNTDKEYIKKNLIGALLFDGGNTASDRRLKRTARRRYTCRRNRILYLQEIFAEEMSKVDDSFFHRLEDSFLVEDDKRGSKYPIFATMQEEKDYHEKFPTIYHLRKELADKKEKANLRLVYLALAHIIKFRGHFLIEDDSFDVRNTDIQRQYQAFLEIFDTTFENNHLLSQNIDVEGILTDKISKSAKKDRILAQYPNQKSTGIFAEFLKLIVGNQADFKKHFNLEDKTPLQFAKDSYDEDLENLLGQIGDEFADLFSVAKKLYDSVLLSGILTVTDLSTKAPLSASMIQRYDEHREDLKQLKQFVKASLPEKYQEIFTDSSKDGYAGYIEGKTNQGAFYKYLSKLLTKQEGSEYFLEKIKNEDFLRKQRTFDNGSIPHQVHLTELKAIIRRQSEYYPFLKENLDRIEKILTFRIPYYVGPLAREKSDFAWMTRKTDDSIRPWNFEELVDKEASAEAFIHRMTNNDLYLPEEKVLPKHSLIYEKFTVYNELTKVRYKNEQGETYFFDSNIKQEIFDGVFKEHRKVSKKKLLDFLAKEYEEFRIVDVIGLDKENKAFNASLGTYHDLKKILDKDFLDNPDNESILEDIVQTLTLFEDREMIKKRLENYKDLFTESQLKKLYRRHYTGWGRLSAKLINGIRDKESQKTILDYLISDGRANRNFMQLIHDDGLSFKPIIDKAQAGSHSDNLKEVVGELAGSPAIKKGILQSLKIVDELVKVMGYEPEQVVVEMARENQTTNQGRRNTRQRYKLLEEGVKNLASNILKEYPTDNQALQNERLFLYYLQNGRDMYTGEALDIDNLSQYDIDHIVPQAFIKDDSIDNRVLVSSAKNRGKSDNVPSIDIVKARKAFWKKLLDAKLMSQRKYDNLTKAERGGLTSDDKARFIQRQLVETRQITKHVARILDERFNNELDSKGRRIRKVKIVTLKSNLVSNFRKEFGFYKIREVNDYHHAHDAYLNAVVAKAILTKYPQLEPEFVYGDYPKYNSYKTRKATEKLFFYSNIMNFFKTKVTLADGTVVVKDDIEVNNDTGEIVWDKKKHFATVRKVLSYPQVNIVKKTEIQTGGFSKESILAHGNSDKLIPRKTKDIYLDPKKYGGFDSPIVAYSVLVVADIKKGKAQKLKTVTELLGITIMERFRFEKNPSAFLESKGYLNIRDDKLMILPKYSLFELENGRRRLLASAGELQKGNELALPTQYMKFLYLASRYNELKGKPEEIEQKQEFVVQHVSYFDDILQIINDFSNRVILADANLEKINKLYQDNKENISVDELANNIINLFTFTSLGAPAAFKFFDKIVDRKRYTSTKEVLNSTLIHQSITGLYETRIDLGKLGED

SEQ ID NO: 66 - protein, 1365 aa, Streptococcus agalactiae
MNKPYSIGLDIGTNSVGYSVVTDDYKVPAKKMRVLGNTDKEYIKKNLIGALLFDGGNTASDRRLKRTARRRYTRRRNRILYLQEIFAEEMSKVDDSFFHRLEDSFLVEDDKRGSKYPIFATMQEEKDYHEKFPTIYHLRKELADKKEKADLRLVYLALAHIIKFRGHFLIEDDSFDVRNTDIQRQYQAFLEIFDTTFENNHLLSQNIDVEGILTDKISKSAKKDRILAQYPNQKSTGIFAEFLKLIVGNQADFKKHFNLEDKTPLQFAKDSYDEDLENLLGQIGDEFADLFSVAKKLYDSVLLSGILTVTDLSTKAPLSASMIQRYDEHREDLKQLKQFVKASLPEKYQEIFTDSSKDGYAGYIEGKTNQGAFYKYLSKLLTKQEGSEYFLEKIKNEDFLRKQRTFDNGSIPHQVHLTELKAIIRRQSEYYPFLKENLDRIEKILTFRIPYYVGPLAREKSDFAWMTRKTDDSIRPWNFEELVDKEASAEAFIHRMTNNDLYLPEEKVLPKHSLIYEKFTVYNELTKVRYKNEQGETYFFDSNIKQEIFDGVFKEHRKVSKKKLLDFLAKEYEEFRIVDVIGLDKENKAFNASLGTYHDLKKILDKDFLDNPDNESILEDIVQTLTLFEDREMIKKRLENYKDLFTESQLKKLYRRHYTGWGRLSAKLINGIRDKESQKTILDYLISDGRANRNFMQLIHDDGLSFKPIIDKAQAGSHSDNLKEVVGELAGSPAIKKGILQSLKIVDELVKVMGYEPEQVVVEMARENQTTNQGRRNTRQRYKLLEEGVKNLASNILKEYPTDNQALQNERLFLYYLQNGRDMYTGEALDIDNLSQYDIDHIVPQAFIKDDSIDNRVLVSSAKNRGKSDNVPSIDIVKARKAFWKKLLDAKLMSQRKYDNLTKAERGGLTSDDKARFIQRQLVETRQITKHVARILDERFNNELDSKGRRIRKVKIVTLKSNLVSNFRKEFGFYKIREVNDYHHAHDAYLNAVVAKAILTKYPQLEPEFVYGDYPKYNSYKTRKATEKLFFYSNIMNFFKTKVTLADGTVVVKDDIEVNNDTGEIVWDKKKHFATVRKVLSYPQVNIVKKTEIQTGGFSKESILAHGNSDKLIPRKTKDIYLDPKKYGGFDSPIVAYSVLVVADIKKGKAQKLKTVTELLGITIMERFRFEKNPSAFLESKGYLNIRDDKLMILPKYSLFELENGRRRLLASAGELQKGNELALPTQYMKFLYLASRYNELKGKPEEIEQKQEFVVQHVSYFDDILQIINDFSNRVILADANLEKINKLYQDNKENISVDELANNIINLFTFTSLGAPAAFKFFDKIVDRKRYTSTKEVLNSTLIHQSITGLYETRIDLGKLGED

SEQ ID NO: 67 - protein, 1365 aa, Streptococcus agalactiae
MNKPYSIGLDIGTNSVGYSVVTDDYKVPAKKMRVLGNTDKEYIKKNLIGALLFDGGNTASDRRLKRTARRRYTRRRNRILYLQEIFAEEMSKVDDSFFHRLEDSFLVEDDKRGSKYPIFATMQEEKDYHEKFPTIYHLRKELADKKEKADLRLVYLALAHIIKFRGHFLIEDDSFDVRNTDIQRQYQAFLEIFDTTFENNHLLSQNIDVEGILTDKISKSAKKDRILAQYPNQKSTGIFAEFLKLIVGNQADFKKHFNLEDKTPLQFAKDSYDEDLENLLGQIGDEFADLFSVAKKLYDSVLLSGILTVTDLSTKAPLSASMIQRYDEHREDLKQLKQFVKASLPEKYQEIFTDSSKDGYAGYIEGKTNQGAFYKYLSKLLTKQEGSEYFLEKIKNEDFLRKQRTFDNGSIPHQVHLTELKAIIRRQSEYYPFLKENLDRIEKILTFRIPYYVGPLAREKSDFAWMTRKTDDSIRPWNFEELVDKEASAEAFIHRMTNNDLYLPEEKVLPKHSLIYEKFTVYNELTKVRYKNEQGETYFFDSNIKQEIFDGVFKEHRKVSKKKLLDFLAKEYEEFRIVDVIGLDKENKAFNASLGTYHDLKKILDKDFLDNPDNESILEDIVQTLTLFEDREMIKKRLENYKDLFTESQLKKLYRRHYTGWGRLSAKLINGIRDKESQKTILDYLISDGRANRNFMQLIHDDGLSFKPIIDKAQAGSHSDNLKEVVGELAGSPAIKKGILQSLKIVDELVKVMGYEPEQVVVEMARENQTTNQGRRNTRQRYKLLEEGVKNLASNILKEYPTDNQALQNERLFLYYLQNGRDMYTGETLDIDNLSQYDIDHIVPQAFIKDDSIDNRVLVSSAKNRGKSDNVPSIDIVKARKAFWKKLLDAKLMSQRKYDNLTKAERGGLTSDDKARFIQRQLVETRQITKHVARILDERFNNELDSKGRRIRKVKIVTLKSNLVSNFRKEFGFYKIREVNDYHHAHDAYLNAVVAKAILTKYPQLEREFVYGDYPKYNSYKTRKATEKLFFYSNIMNFFKTKVTLADGTVVVKDDIEVNNDTGEIVWDKKKHFATVRKVLSYPQVNIVKKTEIQTGGFSKESILAHGNSDKLIPRKTKDIYLDPKKYGGFDSPIVAYSVLVVADIKKGKAQKLKTVTELLGITIMERFRFEKNPSAFLESKGYLNIRDDKLMILPKYSLFELENGRRRLLASAGELQKGNELALPTQYMKFLYLASRYNELKGKPEEIEQKQEFVVQHVSYFDDILQIINDFSNRVILADANLEKINKLYQDNKENISVDELANNIINLFTFTSLGAPAAFKFFDKIVDRKRYTSTKEVLNSTLIHQSITGLYETRIDLGKLGED

SEQ ID NO: 68 - protein, 1365 aa, Streptococcus agalactiae
MNKPYSIGLDIGTNSVGYSVVTDDYKVPAKKMRVLGNTDKEYIKKNLIGALLFDGGNTASDRRLKRTARRRYTRRRNRILYLQEIFAEEMSKVDDSFFHRLEDSFLVEDDKRGSKYPIFATMQEEKDYHEKFPTIYHLRKELADKKEKANLRLVYLALAHIIKFRGHFLIEDDSFDVRNTDIQRQYQAFLEIFDTTFENNHLLSQNIDVEGILTDKISKSAKKDRILAQYPNQKSTGIFAEFLKLIVGNQADFKKHFNLEDKTPLQFAKDSYDEDLENLLGQIGDEFADLFSVAKKLYDSVLLSGILTVTDLSTKAPLSASMIQRYDEHREDLKQLKQFVKASLPEKYQEIFTDSSKDGYAGYIEGKTNQGAFYKYLSKLLTKQEGSEYFLEKIKNEDFLRKQRTFDNGSIPHQVHLTELKAIIRRQSEYYPFLKENLDRIEKILTFRIPYYVGPLAREKSDFAWMTRKTDDSIRPWNFEELVDKEASAEAFIHRMTNNDLYLPEEKVLPKHSLIYEKFTVYNELTKVRYKNEQGETYFFDSNIKQEIFDGVFKEHRKVSKKKLLDFLAKEYEEFRIVDVIGLDKENKAFNASLGTYHDLKKILDKDFLDNPDNESILEDIVQTLTLFEDREMIKKRLENYKDLFTESQLKKLYRRHYTGWGRLSAKLINGIRDKESQKTILDYLISDGRANRNFMQLIHDDGLSFKPIIDKAQAGSHSDNLKEVVGELAGSPAIKKGILQSLKIVDELVKVMGYEPEQVVVEMARENQTTNQGRRNTRQRYKLLEEGVKNLASNILKEYPTDNQALQNERLFLYYLQNGRDMYTGEALDIDNLSQYDIDHIVPQAFIKDDSIDNRVLVSSAKNRGKSDNVPSIDIVKARKAFWKKLLDAKLMSQRKYDNLTKAERGGLTSDDKARFIQRQLVETRQITKHVARILDERFNNELDSKGRRIRKVKIVTLKSNLVSNFRKEFGFYKIREVNDYHHAHDAYLNAVVAKAILTKYPQLEPEFVYGDYPKYNSYKTRKATEKLFFYSNIMNFFKTKVTLADGTVVVKDDIEVNNDTGEIVWDKKKHFATVRKVLSYPQVNIVKKTEIQTGGFSKESILAHGNSDKLIPRKTKDIYLDPKKYGGFDSPIVAYSVLVVADIKKGKAQKLKTVTELLGITIMERFRFEKNPSAFLESKGYLNIRDDKLMILPKYSLFELENGRRRLLASAGELQKGNELALPTQYMKFLYLASRYNELKGKPEEIEQKQEFVVQHVSYFDDILQIINDFSNRVILADANLEKINKLYQDNKENISVDELANNIINLFTFTSLGAPAAFKFFDKIVDRKRYTSTKEVLNSTLIHQFITGLYETRIDLGKLGED

SEQ ID NO: 69 - protein, 1365 aa, Streptococcus agalactiae
MNKPYSIGLDIGTNSVGYSVVTDDYKVPAKKMRVLGNTDKEYIKKNLIGALLFDGGNTASDRRLKRTARRRYTRRRNRILYLQEIFAEEMSKVDDSFFHRLEDSFLVEDDKRGSKYPIFATMQEEKDYHEKFPTIYHLRKELADKKEKANLRLVYLALAHIIKFRGHFLIEDDSFDVRNTDIQRQYQAFLEIFDTTFENNHLLSQNIDVEGILTDKISKSAKKDRILAQYPNQKSTGIFAEFLKLIVGNQADFKKHFNLEDKTPLQFAKDSYDEDLENLLGQIGDEFADLFSVAKKLYDSVLLSGILTVTDLSTKAPLSASMIQRYDEHREDLKQLKQFVKASLPEKYQEIFTDSSKDGYAGYIEGKTNQGAFYKYLSKLLTKQEGSEYFLEKIKNEDFLRKQRTFDNGSIPHQVHLTELKAIIRRQSEYYPFLKENLDRIEKILTFRIPYYVGPLAREKSDFAWMTRKTDDSIRPWNFEELVDKEASAEAFIHRMTNNDLYLPEEKVLPKHSLIYEKFTVYNELTKVRYKNEQGETYFFDSNIKQEIFDGVFKEHRKVSKKKLLDFLAKEYEEFRIVDVIGLDKENKAFNASLGTYHDLKKILDKDFLDNPDNESILEDIVQTLTLFEDREMIKKRLENYKDLFTESQLKKLYRRHYTGWGRLSAKLINGIRDKESQKTILDYLISDGRANRNFMQLIHDDGLSFKPIIDKAQAGSHSDNLKEVVGELAGSPAIKKGILQSLKIVDELVKVMGYEPEQVVVEMARENQTTNQGRRNTRQRYKLLEEGVKNLASNILKEYPTDNQALQNERLFLYYLQNGRDMYTGEALDIDNLSQYDIDHIVPQAFIKDDSIDNRVLVSSAKNRGKSDNVPSIDIVKARKAFWKKLLDAKLMSQRKYDNLTKAERGGLTSDDKARFIQRQLVETRQITKHVARILDERFNNELDSKGRRIRKVKIVTLKSNLVSNFRKEFGFYKIREVNDYHHAHDAYLNAVVAKAILTKYPQLEPEFVYGDYPKYNSYKTRKATEKLFFYSNIMNFFKTKVTLADGTVVVKDDIEVNNDTGEIVWDKKKHFATVRKVLSYPQVNIVKKTEIQTGGFSKESILAHGNSDKLIPRKTKDIYLDPKKYGGFDSPIVAYSVLVVADIKKGKAQKLKTVTELLGITIMERFRFEKNPSAFLESKGYLNIRDDKLMILPKYSLFELENGRRRLLASAGELQKGNELALPTQYMKFLYLASRYNELKGKPEEIEQKQEFVVQHVSYFDDILQIINDFSNRVILADANLEKINKLYQDNKENISVDELANNIINLFTFTSLGAPAAFKFFDKIVDRKRYTSTKEVLNSTLIHQSITGLYETRIDLGKLGED

SEQ ID NO: 70 - protein, 1365 aa, Streptococcus agalactiae
MNKPYSIGLDIGTNSVGWSIITDDYKVPAKKMRVLGNTDKEYIKKNLIGALLFDGGNTAADRRLKRTARRRYTRRRNRILYLQEIFAEEMSKVDDSFFHRLEDSFLVEEDKRGSKYPIFATMQEEKDYHEKFPTIYHLRKELADKKEKADLRLVYLALAHIIKFRGHFLIEDDRFDVRNTDIQKQYQAFLEIFDTSFENNHLLSQNVDVEAILTDKISKSAKKDRILAQYPNQKSTGIFAEFLKLIVGNQADFKKHFNLEDKTPLQFAKDSYDEDLENLLGQIGDEFADLFSAAKKLYDSVLLSGILTVTDLSTKAPLSASMIQRYDEHREDLKQLKQFVKASLPEKYQEIFADSSKDGYAGYIEGKTNQEAFYKYLSKLLTKQEDSEYFLEKIKNEDFLRKQRTFDNGSIPHQVHLTELKAIIRRQSEYYPFLKENQDKIEKILTFRIPYYVGPLARGNSDFAWMTRKTDDSIRPWNFEDLVDKEKSAEAFIHRMTNNDLYLPEEKVLPKHSLIYEKFTVYNELTKVRYKNEQGETYFFDSNVKQEIFDGVFKEHRKVSKKQLLDFLAKEFEEFRIVDVTGLDKENKAFNASLGTYHDLKKILDKDFLDNPDNESILEDIVQTITLFEDREMIKKRLENYKDLFTESQLKKLYRRHYTGWGRLSAKLINGIRDRESQKTILDYLISDGRANRNFMQLINDDGLSFKSIISKAQSGSHSDNLKEVVGELAGSPAIKKGILQSLKIVDELVKVMGYEPEQIVVEMARENQTTNQGRRNSRQRYKLLEDGVKNLASDILKEYPTDNQALQNERLFLYYLQNGRDMYTGEALDIDNLSQYDIDHIVPQAFIKDDSIDNRVLVSSAKNRGKSDDVPSIDIVKARKAFWKKLLDAKLISQRKYDNLTKAERGGLTPDDKAGFIQRQLVETRQITKHVARILDERFNNKVDDNNKPIRKVKIVTLKSNLVSNFRKEFGFYKIREVNNYHHAHDAYLNAVVAKAILTKYPQLEPEFVYGDYPKYNSYKTRKATEKLFFYSNIMNFFKTKVTLADETVVVKDDIEVNNETGEIAWDKKKHFATVRKVLSYPQVNIVKKTEVQTGGFSKESILAHSNSDKLIPRKTKDIYLDPKKYGGFDSPIVAYSVLVLADIKKGKAQKLKTVKELIGITIMERERFEKNPSAFLESKGYLNIRTDKLIILPKYSLFELENGRRRLLASAGELQKGNELALPTQYMKFLYLASRYNESKGKPEEIEKKQEFVNQHVSYFDDILQLINDFSKRVILADANLEKINKLYSDNKDNTPVDELAKNIINLFTFTSLGAPAAFKFFDKSVDRKRYTSTKEVLDSTLIHQSITGLYETRIDLGKLGED

SEQ ID NO: 71 - protein, 1365 aa, Streptococcus agalactiae
MNKPYSIGLDIGTNSVGWSIITDDYKVPAKKMRVLGNTDKEYIKKNLIGALLFDGGNTAADRRLKRTARRRYTRRRNRILYLQEIFAEEMSKVDDSFFHRLEDSFLVEEDKRGSKYPIFATMQEEKYYHEKFPTIYHLRKELADKKEKADLRLIYLALAHIIKFRGHFLIEDDRFDVRNTDIQKQYQAFLEIFDTTFENNDLLSQNVDVEAILTDKISKSAKKDRILARYPNQKSTGIFAEFLKLIVGNQADFKKHFNLEDKTPLQFAKDSYDEDLENLLGQIGDEFADLFSAAKKLYDSVLLSGILTVTDLSTKAPLSASMIQRYDEHREDLKQLKQFVKASLPEKYQEIFADSSKDGYAGYIEGKTNQEAFYKYLSKLLTKQEGSEYLLEKIKNEDFLRKQRTFDNGSIPHQVHLTELRAIIRRQSEYYPFLKENLDRIEKILTFRIPYYVGPLAREKSDFAWMTRKTDDSIRPWNFEDLVDKEKSAEAFIHRMTNNDLYLPEEKVLPKHSLIYEKFTVYNELTKVRFLAEGFKDFQFLNRKQKETIFNSLFKEKRKVTEKDIISFLNKVDGYEGIAIKGIEKQFNASLSTYHDLKKILGKDFLDNTDNELILEDIVQTLTLFEDREMIRKRLDIYKDFFTESQLKKLYRRHYTGWGRLSAKLINGIRNKENQKTILDYLIDDGSANRNFMQLIKDAGLSFKPIIDKARTGSHSDNLKEVVGELAGSPAIKKGILQSLKIVDELVKVMGYEPEQIVVEMARENQTTAKGLSRLRQRLTTLRESLANLKSEKKPKYVKDQVENHHLSDDRLFLYYLQNGKDMYTDDELDIDNLSQYDIDLIIPQAFIKDDSIDNRVLVSSAKNRGKSDDVPSVEIVKDCKVFWKKLLDAKLMSQRKYDNLTKAERGGLTSDDKARFIQRQLVETRQITKHVARILDERFNNELDSKGRRIRKVKIVTLKSNLVSNFRKEFGFYKIREVNNYHHAHDAYLNAVVAKAILTKYPQLEPEFVYGDYPKYNSYKTRKATEKLFFYSNIMNFFKTKVTLADGTVVVKDDIEVNNDTGEIVWDKKKHFATVRKVLSYPQVNIVKKTEIQTGGFSKESILAHGNSDKLIPRKTKDIYLDPKKYGGFDSPIVAYSVLVVADIKKGKAQKLKTVTELLGITIMERSRFEKNPSAFLESKGYLNIRDDKLMILPKYSLFELENGRRRLLASADELQKGNELALPTQFMKFLYLASRYNELKGKPEEIEQKQEFVVQHVSYFDDILQIINDFSNRVILADANLEKINKLYQDNKENIPVDELANNIINLFTFTSLGAPAAFKFFDKIVDRKRYTSTKEVLNSTLIHQSITGLYETRIDLGKLGED

SEQ ID NO: 72 - protein, 1365 aa, Streptococcus agalactiae
MNKPYSIGLDIGTNSVGWSIITDDYKVPAKKMRVLGNTDKEYIKKNLIGALLFDGGNTASDRRLKRTARRRYTRRRNRILYLQEIFAEEMSKVDDSFFHRLEDSFLVEDDKRGSKYPIFATMQEEKDYHEKFPTIYHLRKELADKKEKADLRLFYLALAHIIKFRGHFLIEDDSFDVRNTDIQRQYQAFLEIFDTTFENNHLLSQNIDIEGILTDKISKSAKKDRILAQYPNQKSTGIFAEFLKLIVGNQADFKKHFNLEDKTPLQFAKDSYDEDLENLLGQIGDEFADLFSVAKKLYDSVLLSGILTVTDLSTKAPLSASMIQRYDEHREDLKQLKQFVKASLPEKYQEIFTDSSKDGYAGYIEGKTNQGAFYKYLSKLLTKQEGSEYFLEKIKNEDFLRKQRTFDNGSIPHQVHLTELKAIIRRQSEYYPFLKENLDRIEKILTFRIPYYVGPLAREKSDFAWMTRKTDDSIRPWNFEELVDKEASAEAFIHRMTNNDLYLPEEKVLPKHSLIYEKFTVYNELTKVRYKNEQGETYFFDSNIKQEIFDGVFKEHRKVSKKKLLDFLAKEYEEFRIVDVIGLDKENKAFNASLGTYHDLKKILDKDFLDNPDNESILEDIVQTLTLFEDREMIKKRLENYKDLFTESQLKKLYRRHYTGWGRLSAKLINGIRDKESQKTILDYLIDDGKSNRNFMQLIHDDGLSFKSIISKAQAGSHSDNLKEVVGELAGSPAIKKGILQSLKIVDELVKVMGYEPEQIVVEMARENQTTNQGRRNSRQRYKLLDDGVKNLASNILKEYPTDNQALQNERLFLYYLQNGRDMYTGKALDIDNLSQYDIDHIIPQAFIKDDSIDNRVLVSSAKNRGKSDDVPSLEIVKDCKVFWKKLLDAKLMSQRKYDNLTKAERGGLTSDDKARFIQRQLVETRQITKHVARILDERFNNELDSKGRRIRKVKIVTLKSNLVSNFRKEFGFYKIREVNNYHHAHDAYLNAVVAKAILTKYPQLEPEFVYGDYPKYNSYKTRKATEKLFFYSNIMNFFKTKVTLADGTVVVKDDIEVNNDTGEIVWDKKKHFATVRKVLSYPQVNIVKKTEIQTGGFSKESILAHGNSDKLIPRKTKDIYLDPKKYGGFDSPIVAYSVLVVADIKKGKAQKLKTVTELLGITIMERSRFEKNPSAFLESKGYLNIRDDKLMILPKYSLFELENGRRRLLASAGELQKGNELALPTQFMKFLYLASRYNELKGKPEEIEQKQEFVVQHVSYFDDILQIINDFSNRVILADANLEKINKLYQDNKENISVDELANNIINLFTFTSLGAPAAFKFFDKIVDRKRYTSTKEVLNSTLIHQSITGLYETRIDLGKLGED

SEQ ID NO: 73 - protein, 1365 aa, Streptococcus agalactiae
MNKPYSIGLDIGTNSVGWSIITDDYKVPAKKMRVLGNTDKEYIKKNLIGALLFDGGNTASDRRLKRTARRRYTRRRNRILYLQEIFAEEMSKVDDSFFHRLEDSFLVEDDKRGSKYPIFATMQEEKDYHEKFPTIYHLRKELADKKEKADLRLFYLALAHIIKFRGHFLIEDDSFDVRNTDIQRQYQAFLEIFDTTFENNHLLSQNIDVEGILTDKISKSAKKDRILAQYPNQKSTGIFAEFLKLIVGNQADFKKHFNLEDKTPLQFAKDSYDEDLENLLGQIGDEFADLFSVAKKLYDSVLLSGILTVTDLSTKAPLSASMIQRYDEHREDLKQLKQFVKASLPEKYQEIFTDSSKDGYAGYIEGKTNQGAFYKYLSKLLTKQEGSEYFLEKIKNEDFLRKQRTFDNGSIPHQVHLTELKAIIRRQSEYYPFLKENLDRIEKILTFRIPYYVGPLAREKSDFAWMTRKTDDSIRPWNFEELVDKEASAEAFIHRMTNNDLYLPEEKVLPKHSLIYEKFTVYNELTKVRYKNEQGETYFFDSNIKQEIFDGVFKEHRKVSKKKLLDFLAKEYEEFRIVDVIGLDKENKAFNASLGTYHDLKKILDKDFLDNPDNESILEDIVQTLTLFEDREMIKKRLENYKDLFTESQLKKLYRRHYTGWGRLSAKLINGIRDKESQKTILDYLIDDGKSNRNFMQLIHDDGLSFKSIISKAQAGSHSDNLKEVVGELAGSPAIKKGILQSLKIVDELVKVMGYEPEQIVVEMARENQTTNQGRRNSRQRYKLLDDGVKNLASNILKEYPTDNQALQNERLFLYYLQNGRDMYTGKALDIDNLSQYDIDHIIPQAFIKDDSIDNRVLVSSAKNRGKSDDVPSLEIVKDCKVFWKKLLDAKLMSQRKYDNLTKAERGGLTSDDKARFIQRQLVETRQITKHVARILDERFNNELDSKGRRIRKVKIVTLKSNLVSNFRKEFGFYKIREVNNYHHAHDAYLNAVVAKAILTKYPQLEPEFVYGDYPKYNSYKTRKATEKLFFYSNIMNFFKTKVTLADGTVVVKDDIEVNNDTGEIVWDKKKHFATVRKVLSYPQVNIVKKTEIQTGGFSKESILAHGNSDKLIPRKTKDIYLDPKKYGGFDSPIVAYSVLVVADIKKGKAQKLKTVTELLGITIMERSRFEKNPSAFLESKGYLNIRDDKLMILPKYSLFELENGRRRLLASAGELQKGNELALPTQFMKFLYLASRYNELKGKPEEIEQKQEFVVQHVSYFDDILQIINDFSNRVILADANLEKINKLYQDNKENISVDELANNIINLFTFTSLGAPAAFKFFDKIVDRKRYTSTKEVLNSTLIHQSITGLYETRIDLGKLGED

SEQ ID NO: 74 - protein, 1365 aa, Streptococcus agalactiae
MNKPYSIGLDIGTNSVGWSIITDDYKVPAKKMRVLGNTDKEYIKKNLIGALLFDGGNTAADRRLKRTARRRYTRRRNRILYLQEIFAEEMSKVDDSFFHRLEDSFLVEEDKRGSKYPIFATLQEEKDYHEKFPTIYHLRKELADKKEKADLRLIYIALAHIIKFRGHFLIEDDSFDVRNTDISKQYQDFLEIFNTTFENNDLLSQNVDVEAILTDKISKSAKKDRILAQYPNQKSTGIFAEFLKLIVGNQADFKKYFNLEDKTPLQFAKDSYDEDLENLLGQIGDEFADLFSAAKKLYDSVLLSGILTVIDLSTKAPLSASMIQRYDEHREDLKQLKQFVKASLPEKYQEIFADSSKDGYAGYIEGKTNQEAFYKYLSKLLTKQEDSENFLEKIKNEDFLRKQRTFDNGSIPHQVHLTELKAIIRRQSEYYPFLKENQDRIEKILTFRIPYYIGPLAREKSDFAWMTRKTDDSIRPWNFEDLVDKEKSAEAFIHRMTNNDFYLPEEKVLPKHSLIYEKFTVYNELTKVRYKNEQGETYFFDSNIKQEIFDGVFKEHRKVSKKKLLDFLAKEYEEFRIVDVIGLDKENKAFNASLGTYHDLEKILDKDFLDNPDNESILEDIVQTLTLFEDREMIKKRLENYKDLFTESQLKKLYRRHYTGWGRLSAKLINGIRDKESQKTILDYLIDDGRSNRNFMQLINDDGLSFKSIISKAQAGSHSDNLKEVVGELAGSPAIKKGILQSLKIVDELVKVMGYEPEQIVVEMARENQTTNQGRRNSRQRYKLLDDGVKNLASNILKEYPTDNQALQNERLFLYYLQNGRDMYTGEALDIDNLSQYDIDHIIPQAFIKDDSIDNRVLVSSAKNRGKSDDVPSLEIVKDCKVFWKKLLDAKLMSQRKYDNLTKAERGGLTSDDKARFIQRQLVETRQITKHVARILDERFNNELDSKGRRIRKVKIVTLKSNLVSNFRKEFGFYKIREVNNYHHAHDAYLNAVVAKAILTKYPQLEPEFVYGDYPKYNSYKTRKATEKLFFYSNIMNFFKTKVTLADGTVVVKDDIEVNNDTGEIVWDKKKHFATVRKVLSYPQNNIVKKTEIQTGGFSKESILAHGNSDKLIPRKTKDIYLDPKKYGGFDSPIVAYSVLVVADIKKGKAQKLKTVTELLGITIMERSRFEKNPSAFLESKGYLNIRADKLIILPKYSLFELENGRRRLLASAGELQKGNELALPTQFMKFLYLASRYNESKGKPEEIEKKQEFVNQHVSYFDDILQLINDFSKRVILADANLEKINKLYQDNKENISVDELANNIINLFTFTSLGAPAAFKFFDKIVDRKRYTSTKEVLNSTLIHQSITGLYETRIDLGKLGED

SEQ ID NO: 75 - protein, 1365 aa, Streptococcus agalactiae
MNKPYSIGLDIGTNSVGYSVVTDDYKVPAKKMRVLGNTDKEYIKKNLIGALLFDGGNTASDRRLKRTARRRYTRRRNRILYLQEIFAEEMSKVDDSFFHRLEDSFLVEDDKRGSKYPIFATMQEEKDYHEKFPTIYHLRKELADKKEKADLRLVYLALAHIIKFRGHFLIEDDSFDVRNTDIQRQYQAFLEIFDTTFENNHLLSQNIDVEGILTDKISKSAKKDRILAQYPNQKSTGIFAEFLKLIVGNQADFKKHFNLEDKTPLQFAKDSYDEDLENLLGQIGDEFADLFSVAKKLYDSVLLSGILTVTALSTKAPLSASMIQRYDEHREDLKQLKQFVKASLPEKYQEIFTDSSKDGYAGYIEGKTNQGAFYKYLSKLLTKQEGSEYFLEKIKNEDFLRKQRTFDNGSIPHQVHLTELKAIIRRQSEYYPFLKENLDRIEKILTFRIPYYVGPLAREKSDFAWMTRKTDDSIRPWNFEELVDKEASAEAFIHRMTNNDLYLPEEKVLPKHSLIYEKFTVYNELTKVRYKNEQGETYFFDSNIKQEIFDGVFKEHRKVSKKKLLDFLAKEYEEFRIVDVIGLDKENKAFNASLGTYHDLKKILDKDFLDNPDNESILEDIVQTLTLFEDREMIKKRLENYKDLFTESQLKKLYRRHYTGWGRLSAKLINGIRDKESQKTILDYLISDGRANRNFMQLIHDDGLSFKPIIDKAQAGSHSDNLKEVVGELAGSPAIKKGILQSLKIVDELVKVMGYEPEQVVVEMARENQTTNQGRRNTRQRYKLLEEGVKNLASNILKEYPTDNQALQNERLFLYYLQNGRDMYTGEALDIDNLSQYDIDHIVPQAFIKDDSIDNRVLVSSAKNRGKSDNVPSIDIVKARKAFWKKLLDAKLMSQRKYDNLTKAERGGLTSDDKARFIQRQLVETRQITKHVARILDERFNNELDSKGRRIRKVKIVTLKSNLVSNFRKEFGFYKIREVNDYHHAHDAYLNAVVAKAILTKYPQLEPEFVYGDYPKYNSYKTRKATEKLFFYSNIMNFFKTKVTLADGTVVVKDDIEVNNDTGEIVWDKKKHFATVRKVLSYPQVNIVKKTEIQTGGFSKESILAHGNSDKLIPRKTKDIYLDPKKYGGFDSPIVAYSVLVVADIKKGKAQKLKTVTELLGITIMERFRFEKNPSAFLESKGYLNIRDDKLMILPKYSLFELENGRRRLLASAGELQKGNELALPTQYMKFLYLASRYNELKGKPEEIEQKQEFVVQHVSYFDDILQIINDFSNRVILADANLEKINKLYQDNKENISVDELANNIINLFTFTSLGAPAAFKFFDKIVDRKRYTSTKEVLNSTLIHQSITGLYETRIDLGKLGED

SEQ ID NO: 76 - protein, 1365 aa, Streptococcus agalactiae
MNKPYSIGLDIGTNSVGWSIITDDYKVPAKKMRVLGNTDKEYIKKNLIGALLFDGGNTAADRRLKRTARRRYTRRRNRILYLQEIFAEEMSKVDDSFFHRLEDSFLVEEDKRGSKYPIFATLQEEKDYHEKFSTIYHLRKELADKKEKADLRLIYIALAHIIKFRGHFLIEDDSFDVRNTDISKQYQDFLEIFNTTFENNDLLSQNVDVEAILTDKISKSAKKDRILAQYPNQKSTGIFAEFLKLIVGNQADFKKYFNLEDKTPLQFAKDSYDEDLENLLGQIGDEFADLFSAAKKLYDSVLLSGILTVIDLSTKAPLSASMIQRYDEHREDLKQLKQFVKASLPEKYQEIFADSSKDGYAGYIEGKTNQEAFYKYLSKLLTKQEDSENFLEKIKNEDFLRKQRTFDNGSIPHQVHLTELKAIIRRQSEYYPFLKENQDRIEKILTFRIPYYIGPLAREKSDFAWMTRKTDDSIRPWNFEDLVDKEKSAEAFIHRMTNNDFYLPEEKVLPKHSLIYEKFTVYNELTKVRYKNEQGETYFFDSNIKQEIFDGVFKEHRKVSKKKLLDFLAKEYEEFRIVDVIGLDKENKAFNASLGTYHDLEKILDKDFLDNPDNESILEDIVQTLTLFEDREMIKKRLENYKDLFTESQLKKLYRRHYTGWGRLSAKLINGIRDKESQKTILDYLIDDGRSNRNFMQLINDDGLSFKSIISKAQAGSHSDNLKEVVGELAGSPAIKKGILQSLKIVDELVKVMGYEPEQIVVEMARENQTTNQGRRNSRQRYKLLDDGVKNLASNILKEYPTDNQALQNERLFLYYLQNGRDMYTGEALDIDNLSQYDIDHIIPQAFIKDDSIDNRVLVSSAKNRGKSDDVPSLEIVKDCKVFWKKLLDAKLMSQRKYDNLTKAERGGLTSDDKARFIQRQLVETRQITKHVARILDERFNNELDSKGRRIRKVKIVTLKSNLVSNFRKEFGFYKIREVNNYHHAHDAYLNAVVAKAILTKYPQLEPEFVYGDYPKYNSYKTRKATEKLFFYSNIMNFFKTKVTLADGTVVVKDDIEVNNDTGEIVWDKKKHFATVRKVLSYPQNNIVKKTEIQTGGFSKESILAHGNSDKLIPRKTKDIYLDPKKYGGFDSPIVAYSVLVAADIKKGKAQKLKTVTELLGITIMERSRFEKNPSAFLESKGYLNIRADKLIILPKYSLFELENGRRRLLASAGELQKGNELALPTQFMKFLYLASRYNESKGKPEEIEKKQEFVNQHVSYFDDILQLINDFSKRVILADANLEKINKLYQDNKENISVDELANNIINLFTFTSLGAPAAFKFFDKIVDRKRYTSTKEVLNSTLIHQSITGLYETRIDLGKLGED

SEQ ID NO: 77 - protein, 1365 aa, Streptococcus agalactiae
MNKPYSIGLDIGTNSVGWSIITDDYKVPAKKMRVLGNTDKEYIKKNLIGALLFDGGNTAADRRLKRTARRRYTRRRNRILYLQEIFAEEMSKVDDSFFHRLEDSFLVEEDKRGSKYPIFATLQEEKDYHEKFSTIYHLRKELADKKEKADLRLIYIALAHIIKFRGHFLIEDDSFDVRNTDISKQYQDFLEIFNTTFENNDLLSQNVDVEAILTDKISKSAKKDRILAQYPNQKSTGIFAEFLKLIVGNQADFKKYFNLEDKTPLQFAKDSYDEDLENLLGQIGDEFADLFSAAKKLYDSVLLSGILTVIDLSTKASLSDSMIQRYDEHREDLKQLKQFVKASLPEKYQEIFADSSKDGYAGYIEGKTNQEAFYKYLSKLLTKQEDSENFLEKIKNEDFLRKQRTFDNGSIPHQVHLTELKAIIRRQSEYYPFLKENQDRIEKILTFRIPYYIGPLAREKSDFAWMTRKTDDSIRPWNFEDLVDKEKSAEAFIHRMTNNDFYLPEEKVLPKHSLIYEKFTVYNELTKVRYKNEQGETYFFDSNIKQEIFDGVFKEHRKVSKKKLLDFLAKEYEEFRIVDVIGLDKENKAFNASLGTYHDLEKILDKDFLDNPDNESILEDIVQTLTLFEDREMIKKRLENYKDLFTESQLKKLYRRHYTGWGRLSAKLINGIRDKESQKTILDYLIDDGRSNRNFMQLINDDGLSFKSIISKAQAGSHSDNLKEVVGELAGSPAIKKGILQSLKIVDELVKVMGYEPEQIVVEMARENQTTNQGRRNSRQRYKLLDDGVKNLASNILKEYPTDNQALQNERLFLYYLQNGRDMYTGEALDIDNLSQYDIDHIIPQAFIKDDSIDNRVLVSSAKNRGKSDDVPSLEIVKDCKVFWKKLLDAKLMSQRKYDNLTKAERGGLTSDDKARFIQRQLVETRQITKHVARILDERFNNELDSKGRRIRKVKIVTLKSNLVSNFRKEFGFYKIREVNNYHHAHDAYLNAVVAKAILTKYPQLEPEFVYGDYPKYNSYKTRKATEKLFFYSNIMNFFKTKVTLADGTVVVKDDIEVNNDTGEIVWDKKKHFATVRKVLSYPQNNIVKKTEIQTGGFSKESILAHGNSDKLIPRKTKDIYLDPKKYGGFDSPIVAYSVLVVADIKKGKAQKLKTVTELLGITIMERSRFEKNPSAFLESKGYLNIRADKLIILPKYSLFELENGRRRLLASAGELQKGNELALPTQFMKFLYLASRYNESKGKPEEIEKKQEFVNQHVSYFDDILQLINDFSKRVILADANLEKINKLYQDNKENISVDELANNIINLFTFTSLGAPAAFKFFDKIVDRKRYTSTKEVLNSTLIHQSITGLYETRIDLGKLGED

SEQ ID NO: 78 - protein, 1365 aa, Streptococcus agalactiae
MNKPYSIGLDIGTNSVGWSIITDDYKVPAKKMRVLGNTDKEYIKKNLIGALLFDGGNTAADRRLKRTARRRYTRRRNRILYLQEIFAEEMSKVDDSFFHRLEDSFLVEEDKRGSKYPIFATLQEEKDYHEKFSTIYHLRKELADKKEKADLRLIYIALAHIIKFRGHFLIEDDSFDVRNTDISKQYQDFLEIFNTTFENNDLLSQNVDVEAILTDKISKSAKKDRILAQYPNQKSTGIFAEFLKLIVGNQADFKKYFNLEDKTPLQFAKDSYDEDLENLLGQIGDEFADLFSAAKKLYDSVLLSGILTVIDLSTKAPLSASMIQRYDEHREDLKQLKQFVKASLPEKYQEIFADSSKDGYAGYIEGKTNQEAFYKYLSKLLTKQEDSENFLEKIKNEDFLRKQRTFDNGSIPHQVHLTELKAIIRRQSEYYPFLKENQDRIEKILTFRIPYYIGPLAREKSDFAWMTRKTDDSIRPWNFEDLVDKEKSAEAFIHRMTNNDFYLPEEKVLPKHSLIYEKFTVYNELTKVRYKNEQGETYFFDSNIKQEIFDGVFKEHRKVSKKKLLDFLAKEYEEFRIVDVIGLDKENKAFNASLGTYHDLEKILDKDFLDNPDNESILEDIVQTLTLFEDREMIKKRLENYKDLFTESQLKKLYRRHYTGWGRLSAKLINGIRDKESQKTILDYLIDDGRSNRNFMQLINDDGLSFKSIISKAQAGSHSDNLKEVVGELAGSPAIKKGILQSLKIVDELVKVMGYEPEQIVVEMARENQTTNQGRRNSRQRYKLLDDGVKNLASNILKEYPTDNQALQNERLFLYYLQNGRDMYTGEALDIDNLSQYDIDHIIPQAFIKDDSIDNRVLVSSAKNRGKSDDVPSLEIVKDCKVFWKKLLDAKLMSQRKYDNLTKAERGGLTSDDKARFIQRQLVEIRQITKHVARILDERFNNELDSKGRRIRKVKIVTLKSNLVSNFRKEFGFYKIREVNNYHHAHDAYLNAVVAKAILTKYPQLEPEFVYGDYPKYNSYKTRKATEKLFFYSNIMNFFKTKVTLADGTVVVKDDIEVNNDTGEIVWDKKKHFATVRKVLSYPQNNIVKKTEIQTGGFSKESILAHGNSDKLIPRKTKDIYLDPKKYGGFDSPIVAYSVLVVADIKKGKAQKLKTVTELLGITIMERSRFEKNPSAFLESKGYLNIRADKLIILPKYSLFELENGRRRLLASAGELQKGNELALPTQFMKFLYLASRYNESKGKPEEIEKKQEFVNQHVSYFDDILQLINDFSKRVILADANLEKINKLYQDNKENISVDELANNIINLFTFTSLGAPAAFKFFDKIVDRKRYTSTKEVLNSTLIHQSITGLYETRIDLGKLGED

SEQ ID NO: 79 - protein, 1365 aa, Streptococcus agalactiae
MNKPYSIGLDIGTNSVGWSIITDDYKVPAKKMRVLGNTDKEYIKKNLIGALLFDGGNTAADRRLKRTARRRYTRRRNRILYLQEIFAEEMSKVDDSFFHRLEDSFLVEEDKRGSKYPIFATLQEEKDYHEKFSTIYHLRKELADKKEKADLRLIYIALAHIIKFRGHFLIEDDSFDVRNTDISKQYQDFLEIFNTTFENNDLLSQNVDVEAILTDKISKSAKKDRILAQYPNQKSTGIFAEFLKLIVGNQADFKKYFNLEDKTPLQFAKDSYDEDLENLLGQIGDEFADLFSAAKKLYDSVLLSGILTVIDLSTKAPLSASMIQRYDEHREDLKQLKQFVKASLPEKYQEIFADSSKDGYAGYIEGKTNQEAFYKYLSKLLTKQEDSENFLEKIKNEDFLRKQRTFDNGSIPHQVHLTELKAIIRRQSEYYPFLKENQDRIEKILTFRIPYYIGPLAREKSDFAWMTRKTDDSIRPWNFEDLVDKEKSAEAFIHRMTNNDFYLPEEKVLPKHSLIYEKFTVYNELTKVRYKNEQGETYFFDSNIKQEIFDGVFKEHRKVSKKKLLDFLAKEYEEFRIVDVIGLDKENKAFNASLGTYHDLEKILDKDFLDNPDNESILEDIVQTLTLFEDREMIKKRLENYKDLFTESQLKKLYRRHYTGWGRLSAKLINGIRDKESQKTILDYLIDDGRSNRNFMQLINDDGLSFKSIISKAQAGSHSDNLKEVVGELAGSPAIKKGILQSLKIVDELVKVMGYEPEQIVVEMARENQTTNQGRRNSRQRYKLLDDGVKNLASNILKEYPTDNQALQNERLFLYYLQNGRDMYTGEALDIDNLSQYDIDHIIPQAFIKDDSIDNRVLVSSAKNRGKSDDVPSLEIVKDCKVFWKKLLDAKLMSQRKYDNLTKAERGGLTSDDKARFIQRQLVETRQITKHVARILDERFNNELDSKGRRIRKVKIVTVKSNLVSNFRKEFGFYKIREVNNYHHAHDAYLNAVVAKAILTKYPQLEPEFVYGDYPKYNSYKTRKATEKLFFYSNIMNFFKTKVTLADGTVVVKDDIEVNNDTGEIVWDKKKHFATVRKVLSYPQNNIVKKTEIQTGGFSKESILAHGNSDKLIPRKTKDIYLDPKKYGGFDSPIVAYSVLVVADIKKGKAQKLKTVTELLGITIMERSRFEKNPSAFLESKGYLNIRADKLIILPKYSLFELENGRRRLLASAGELQKGNELALPTQFMKFLYLASRYNESKGKPEEIEKKQEFVNQHVSYFDDILQLINDFSKRVILADANLEKINKLYQDNKENISVDELANNIINLFTFTSLGAPAAFKFFDKIVDRKRYTSTKEVLNSTLIHQSITGLYETRIDLGKLGED

SEQ ID NO: 80 - protein, 1365 aa, Streptococcus agalactiae
MNKPYSIGLDIGTNSVGWSIITDDYKVPAKKMRVLGNTDKEYIKKNLIGALLFDGGNTAADRRLKRTARRRYTRRRNRILYLQEIFAEEMSKVDDSFFHRLEDSFLVEEDKRGSKYPIFATLQEEKDYHEKFSTIYHLRKELADKKEKADLRLIYIALAHIIKFRGHFLIEDDSFDVRNTDISKQYQDFLEIFNTTFENNDLLSQNVDVEAILTDKISKSAKKDRILAQYPNQKSTGIFAEFLKLIVGNQADFKKYFNLEDKTPLQFAKDSYDEDLENLLGQIGDEFADLFSAAKKLYDSVLLSGILTVIDLSTKAPLSASMIQRYDEHREDLKQLKQFVKASLPEKYQEIFADSSKDGYAGYIEGKTNQEAFYKYLSKLLTKQEDSENFLEKIKNEDFLRKQRTFDNGSIPHQVHLTELKAIIRRQSEYYPFLKENQDRIEKILTFRIPYYIGPLAREKSDFAWMTRKTDDSIRPWNFEDLVDKEKSAEAFIHRMTNNDFYLPEEKVLPKHSLIYEKFTVYNELTKVRYKNEQGETYFFDSNIKQEIFDGVFKEHRKVSKKKLLDFLAKEYEEFRIVDVIGLDKENKAFNASLGTYHDLEKILDKDFLDNPDNESILEDIVQTLTLFEDREMIKKRLENYKDLFTESQLKKLYRRHYTGWGRLSAKLINGIRDKESQKTILDYLIDDGRSNRNFMQLINDDGLSFKSIISKAQAGSHSDNLKEVVGELAGSPAIKKGILQSLKIVDELVKVMGYEPEQIVVEMARENQTTNQGRRNSRQRYKLLDDGVKNLASNILKEYPTDNQALQNERLFLYYLQNGRDMYTGEALDIDNLSQYDIDHIIPQAFIKDDSIDNRVLVSSAKNRGKSDDVPSLEIVKDCKVFWKKLLDAKLMSQRKYDNLTKAERGGLTSDDKARFIQRQLVETRQITKHVARILDELFNNELDSKGRRIRKVKIVTLKSNLVSNFRKEFGFYKIREVNNYHHAHDAYLNAVVAKAILTKYPQLEPEFVYGDYPKYNSYKTRKATEKLFFYSNIMNFFKTKVTLADGTVVVKDDIEVNNDTGEIVWDKKKHFATVRKVLSYPQNNIVKKTEIQTGGFSKESILAHGNSDKLIPRKTKDIYLDPKKYGGFDSPIVAYSVLVVADIKKGKAQKLKTVTELLGITIMERSRFEKNPSAFLESKGYLNIRADKLIILPKYSLFELENGRRRLLASAGELQKGNELALPTQFMKFLYLASRYNESKGKPEEIEKKQEFVNQHVSYFDDILQLINDFSKRVILADANLEKINKLYQDNKENISVDELANNIINLFTFTSLGAPAAFKFFDKIVDRKRYTSTKEVLNSTLIHQSITGLYETRIDLGKLGGD

SEQ ID NO: 81 - protein, 1365 aa, Streptococcus agalactiae; identical to SEQ ID NO: 50

SEQ ID NO: 82 - protein, 1365 aa, Streptococcus agalactiae
MNKPYSIGLDIGTNSVGYSVVTDDYKVPAKKMRVLGNTDKEYIKKNLIGALLFDGGNTASDRRLKRTARRRYTRRRNRILYLQEIFAEEMSKVDDSFFHRLEDSFLVEDDKRGSKYPIFATMQEEKDYHEKFPTIYHLRKELADKKEKANLRLVYLALAHIIKFRGHFLIEDDSFDVRNTDIQRQYQAFLEIFDTTFENNHLLSQNIDVEGILTDKISKSAKKDRILAQYPNQKSTGIFAEFLKLIVGNQADFKKHFNLEDKTPLQFAKDSYDEDLENLLGQIGDEFADLFSVAKKLYDSVLLSGILTVTDLSTKAPLSASMIQRYDEHREDLKQLKQFVKASLPEKYQEIFTDSSKDGYAGYIEGKTNQGAFYKYLSKLLTKQEGSEYFLEKIKNEDFLRKQRTFDNGSIPHQVHLTELKAIIRRQSEYYPFLKENLDRIEKILTFRIPYYVGPLAREKSDFAWMTRKTDDSIRPWNFEELVDKEASAEAFIHRMTNNDLYLPEEKVLPKHSLIYEKFTVYNELTKVRYKNEQGETYFFDSNIKQEIFDGVFKEHRKVSKKKLLDFLAKEYEEFRIVDVIGLDKENKAFNASLGTYHDLKKILDKDFLDNPDNESILEDIVQTLTLFEDREMIKKRLENYKDLFTESQLKKLYRRHYTGWGRLSAKLINGIRDKESQKTILDYLISDGRANRNFMQLIHDDGLSFKPIIDKAQAGSHSDNLKEVVGELAGSPAIKKGILQSLKIVDELVKVMGYEPEQVVVEMARENQTTNKGRRNTRQRYKLLEEGVKNLASNILKEYPTDNQALQNERLFLYYLQNGRDMYTGEALDIDNLSQYDIDHIVPQAFIKDDSIDNRVLVSSAKNRGKSDNVPSIDIVKARKAFWKKLLDAKLMSQRKYDNLTKAERGGLTSDDKARFIQRQLVETRQITKHVARILDERFNNELDSKGRRIRKVKIVTLKSNLVSNFRKEFGFYKIREVNDYHHAHDAYLNAVVAKAILTKYPQLEPEFVYGDYPKYNSYKTRKATEKLFFYSNIMNFFKTKVTLADGTVVVKDDIEVNNDTGEIVWDKKKHFATVRKVLSYPQVNIVKKTEIQTGGFSKESILAHGNSDKLIPRKTKDIYLDPKKYGGFDSPIVAYSVLVVADIKKGKAQKLKTVTELLGITIMERFRFEKNPSAFLESKGYLNIRDDKLMILPKYSLFELENGRRRLLASAGELQKGNELALPTQYMKFLYLASRYNELKGKPEEIEQKQEFVVQHVSYFDDILQIINDFSNRVILADANLEKINKLYQDNKENISVDELANNIINLFTFTSLGAPAAFKFFDKIVDRKRYTSTKEVLNSTLIHQSITGLYETRIDLGKLGED

SEQ ID NO: 83 - protein, 1365 aa, Streptococcus agalactiae
MNKPYSIGLDIGTNSVGWSIITDDYKVPAKKMRVLGNTDKEYIKKNLIGALLFDGRNTAADRRLKRTARRRYTRRRNRILYLQEIFAEEMSKVDDSFFHRLEDSFLVEEDKRGSKYPIFATLQEEKDYHEKFSTIYHLRKELADKKEKADLRLIYIALAHIIKFRGHFLIEDDSFDVRNTDISKQYQDFLEIFNTTFENNDLLSQNVDVEAILTDKISKSAKKDRILAQYPNQKSTGIFAEFLKLIVGNQADFKKYFNLEDKTPLQFAKDSYDEDLENLLGQIGDEFADLFSAAKKLYDSVLLSGILTVIDLSTKAPLSASMIQRYDEHREDLKQLKQFVKASLPEKYQEIFADSSKDGYAGYIEGKTNQEAFYKYLSKLLTKQEDSENFLEKIKNEDFLRKQRTFDNGSIPHQVHLTELKAIIRRQSEYYPFLKENQDRIEKILTFRIPYYIGPLAREKSDFAWMTRKTDDSIRPWNFEDLVDKEKSAEAFIHRMTNNDFYLPEEKVLPKHSLIYEKFTVYNELTKVRYKNEQGETYFFDSNIKQEIFDGVFKEHRKVSKKKLLDFLAKEYEEFRIVDVIGLDKENKAFNASLGTYHDLEKILDKDFLDNPDNESILEDIVQTLTLFEDREMIKKRLENYKDLFTESQLKKLYRRHYTGWGRLSAKLINGIRDKESQKTILDYLIDDGRSNRNFMQLINDDGLSFKSIISKAQAGSHSDNLKEVVGELAGSPAIKKGILQSLKIVDELVKVMGYEPEQIVVEMARENQTTNQGRRNSRQRYKLLDDGVKNLASNILKEYPTDNQALQNERLFLYYLQNGRDMYTGEALDIDNLSQYDIDHIIPQAFIKDDSIDNRVLVSSAKNRGKSDDVPSLEIVKDCKVFWKKLLDAKLMSQRKYDNLTKAERGGLTSDDKARFIQRQLVETRQITKHVARILDERFNNELDSKGRRIRKVKIVTLKSNLVSNFRKEFGFYKIREVNNYHHAHDAYLNAVVAKAILTKYPQLEPEFVYGDYPKYNSYKTRKATEKLFFYSNIMNFFKTKVTLADGTVVVKDDIEVNNDTGEIVWDKKKHFATVRKVLSYPQNNIVKKTEIQTGGFSKESILAHGNSDKLIPRKTKDIYLDPKKYGGFDSPIVAYSVLVVADIKKGKAQKLKTVTELLGITIMERSRFEKNPSAFLESKGYLNIRADKLIILPKYSLFELENGRRRLLASAGELQKGNELALPTQFMKFLYLASRYNESKGKPEEIEKKQEFVNQHVSYFDDILQLINDFSKRVILADANLEKINKLYQDNKENISVDELANNIINLFTFTSLGAPAAFKFFDKIVDRKRYTSTKEVLNSTLIHQSITGLYETRIDLGKLGED

SEQ ID NO: 84 - protein, 1365 aa, Streptococcus agalactiae
MNKPYSIGLDIGTNSVGWSIITDDYKVPAKKMRVLGNTDKEYIKKNLIGALLFDGGNTAADRRLKRTARRRYTRRRNRILYLQEIFAEEMSKVDDSFFHRLEDSFLVEEDKRGSKYPIFATMQEEKYYHEKFPTIYHLRKELADKKEKADLRLIYLALAHIIKFRGHFLIEDDSFDVRNTDIQKQYQAFLEIFDTTFENNDLLSQNVDVEAILTDKISKSAKKDRILARYPNQKSTGIFAEFLKLIVGNQADFKKHFNLEDKTPLQFAKDSYDEDLENLLGQIGDEFADLFSAAKKLYDSVLLSGILTVTDLSTKAPLSASMIQRYDEHREDLKQLKQFVKASLPEKYQEIFADSSKDGYAGYIEGKTNQEAFYKYLSKLLTKQEGSEYLLEKIKNEDFLRKQRTFDNGSIPHQVHLTELRAIIRRQSEYYPFLKENLDRIEKILTFRIPYYVGPLAREKSDFAWMTRKTDDSIRPWNFEDLVDKEKSAEAFIHRMTNNDLYLPEEKVLPKHSLIYEKFTVYNELTKVRFLAEGFKDFQFLNRKQKETIFNSLFKEKRKVTEKDIISFLNKVDGYEGIAIKGIEKQFNASLSTYHDLKKILGKDFLDNTDNELILEDIVQTLTLFEDREMIRKRLDIYKDFFTESQLKKLYRRHYTGWGRLSAKLINGIRNKENQKTILDYLIDDGSANRNFMQLIKDAGLSFKPIIDKARTGSHSDNLKEVVGELAGSPAIKKGILQSLKIVDELVKVMGYEPEQIVVEMARENQTTAKGLSRSRQRLTTLRESLANLKSEKKPKYVKDQVENHHLSDDRLFLYYLQNGKDMYTDDELDIDNLSQYDIDHIIPQAFIKDDSIDNRVLVSSAKNRGKSDDVPSVEIVKDCKVFWKKLLDAKLMSQRKYDNLTKAERGGLTSDDKARFIQRQLVETRQITKHVARILDERFNNELDSKGRRIRKVKIVTLKSNLVSNFRKEFGFYKIREVNNYHHAHDAYLNAVVAKAILTKYPQLEPEFVYGDYPKYNSYKTRKATEKLFFYSNIMNFFKTKVTLADGTVVVKDDIEVNNDTGEIVWDKKKHFATVRKVLSYPQVNIVKKTEIQTGGFSKESILAHGNSDKLIPRKTKDIYLDPKKYGGFDSPIVAYSVLVVADIKKGKAQKLKTVTELLGITIMERSRFEKNPSAFLESKGYLNIRDDKLMILPKYSLFELENGRRRLLASAGELQKGNELALPTQFMKFLYLASRYNELKGKPEEIEQKQEFVVQHVSYFDDILQIINDFSNRVILADANLEKINKLYQDNKENIPVDELANNIINLFTFTSLGAPAAFKFFDKIVDRKRYTSTKEVLNSTLIHKSITGLYETRIDLGKLGED

SEQ ID NO: 85 - protein, 1365 aa, Streptococcus agalactiae
MNKPYSIGLDIGTNSVGWSIITDDYKVPAKKMRVLGNTDKEYIKKNLIGALLFDGGNTAADRRLKRTARRRYTRRRNRILYLQEIFAEEMSKVDDSFFHRLEDSFLVEEDKRGSKYPIFATLQEEKDYHEKFSTIYHLRKELADKKEKADLRLIYIALAHIIKFRGHFLIEDDSFDVRNTDISKQYQDFLEIFNTTFENNDLLSQNVDVEAILTDKISKSAKKDRILAQYPNQKSTGIFAEFLKLIVGNQADFKKYFNLEDKTPLQFAKDSYDEDLENLLGQIGDEFADLFSAAKKLYDSVLLSGILTVIDLSTKAPLSASMIQRYDEHREDLKQLKQFVKASLPEKYQEIFADSSKDGYAGYIEGKTNQEAFYKYLSKLLTKQEDSENFLEKIKNEDFLRKQRTFDNGSIPHQVHLTELKAIIRRQSEYYPFLKENQDRIEKILTFRIPYYIGPLAREKSDFAWMTRKTDDSIRPWNFEDLVDKEKSAEAFIHRMTNNDFYLPEEKVLPKHSLIYEKFTVYNELTKVRYKNEQGETYFFDSNIKQEIFDGVFKEHRKVSKKKLLDFLAKEYEEFRIVDVIGLDKENKAFNASLGTYHDLEKILDKDFLDNPDNESILEDIVQTLTLFEDREMIKKRLENYKDLFTESQLKKLYRRHYTGWGRLSAKLINGIRDKESQKTILDYLIDDGRSNRNFMQLINDDGLSFKSIISKAQAGSHSDNLKEVVGELAGSPAIKKGILQSLKIVDELVKVMGYEPEQIVVEMARENQTTNQGRRNSRQRYKLLDDGVKNLASNILKEYPTDNQALQNERLFLYYLQNGRDMYTGEALDIDNLSQYDIDHIIPQAFIKDDSIDNRVLVSSAKNRGKSDDVPSLEIVKDCKVFWKKLLDAKLMSQRKYDNLTKAERGGLTSDDKARFIQRQLVETRQITKHVARILDERFNNELDSKGRRIRKVKIVTLKSNLVSNFRKEFGFYKIREVNNYHHAHDAYLNAVVAKAILTKYPQLEPEFVYGDYPKYNSYKTRKATEKLFFYSNIMNFFKTKVTLADGTVVIKDDIEVNNDTGEIVWDKKKHFATVRKVLSYPQNNIVKKTEIQTGGFSKESILAHGNSDKLIPRKTKDIYLDPKKYGGFDSPIVAYSVLVVADIKKGKAQKLKTVTELLGITIMERSRFEKNPSAFLESKGYLNIRADKLIILPKYSLFELENGRRRLLASAGELQKGNELALPTQFMKFLYLASRYNESKGKPEEIEKKQEFVNQHVSYFDDILQLINDFSKRVILADANLEKINKLYQDNKENISVDELANNIINLFTFTSLGAPAAFKFFDKIVDRKRYTSTKEVLNSTLIHQSITGLYETRIDLGKLGED

SEQ ID NO: 86 - protein, 1365 aa, Streptococcus agalactiae
MNKPYSIGLDIGTNSVGWSIITDDYKVPAKKMRVLGNTDKEYIKKNLIGALLFDGGNTAADRRLKRTARRRYTRRRNRILYLQEIFAEEMSKVDDSFFHRLEDSFLVEEDKRGSKYPIFATLQEEKDYHEKFSTIYHLRKELADKKEKADLRLIYIALAHIIKFRGHFLIEDDSFDVRNTDISKQYQDFLEIFNTTFENNDLLSQNVDVEAILTDKISKSAKKDRILAQYPNQKSTGIFAEFLKLIVGNQADFKKYFNLEDKTPLQFAKDSYDEDLENLLGQIGDEFADLFSAAKKLYDSVLLSGILTVIDLSTKAPLSASMIQRYDEHREDLKQLKQFVKASLPEKYQEIFADSSKDGYAGYIEGKTNQEAFYKYLSKLLTKQEDSENFLEKIKNEDFLRKQRTFDNGSIPHQVHLTELKAIIRRQSEYYPFLKENQDRIEKILTFRIPYYIGPLAREKSDFAWMTRKTDDSIRPWNFEDLVDKEKSAEAFIHRMTNNDFYLPEEKVLPKHSLIYEKFTVYNELTKVRYKNEQGETYFFDSNIKQEIFDGVFKEHRKVSKKKLLDFLAKEYEEFRIVDVIGLDKENKAFNASLGTYHDLEKILDKDFLDNPDNESILEDIVQTLTLFEDREMIKKRLENYKDLFTESQLKKLYRRHYTGWGRLSAKLINGIRDKESQKTILDYLIDDGRSNRNFMQLINDDGLSFKSIISKAQAGSHSDNLKEVVGELAGSPAIKKGILQSLKIVDELVKVMGYEPEQIVVEMARENQTTNQGRRNSRQRYKLLDDGVKNLASNILKEYPTDNQALQNERLFLYYLQNGRDMYTGEALDIDNLSQYDIDHIIPQAFIKDDSIDNRVLVSSAKNRGKSDDVPSLEIVKDCKVFWKKLLDAKLMSQRKYDNLTKAERGGLTSDDKARFIQRQLVETRQITKHVASILDERFNNELDSKGRRIRKVKIVTLKSNLVSNFRKEFGFYKIREVNNYHHAHDAYLNAVVAKAILTKYPQLEPEFVYGDYPKYNSYKTRKATEKLFFYSNIMNFFKTKVTLADGTVVVKDDIEVNNDTGEIVWDKKKHFATVRKVLSYPQNNIVKKTEIQTGGFSKESILAHGNSDKLIPRKTKDIYLDPKKYGGFDSPIVAYSVLVVADIKKGKAQKLKTVTELLGITIMERSRFEKNPSAFLESKGYLNIRADKLIILPKYSLFELENGRRRLLASAGELQKGNELALPTQFMKFLYLASRYNESKGKPEEIEKKQEFVNQHVSYFDDILQLINDFSKRVILADANLEKINKLYQDNKENISVDELANNIINLFTFTSLGAPAAFKFFDKIVDRKRYTSTKEVLNSTLIHQSITGLYETRIDLGKLGED

SEQ ID NO: 87 - protein, 1365 aa, Streptococcus agalactiae
MNKPYSIGLDIGTNSVGYSVVTDDYKVPAKKMRVLGNTDKEYIKKNLIGALLFDGGNTASDRRLKRTARRRYTRRRNRILYLQEIFAEEMSKVDDSFFHRLEDSFLVEDDKRGSKYPIFATMQEEKDYHEKFPTIYHLRKELADKKEKANLRLVYLALAHIIKFRGHFLIEDDSFDVRNTDIQRQYQAFLEIFDTTFENNHLLSQNIDVEGILTDKISKSAKKDRILAQYPNQKSTGIFAEFLKLIVGNQADFKKHFNLEDKTPLQFAKDSYDEDLENLLGQIGDEFADLFSVAKKLYDSVLLSGILTVTDLSTKAPLSASMIQRYDEHREDLKQLKQFVKASLPEKYQEIFTDSSKDGYAGYIESKTNQGAFYKYLSKLLTKQEGSEYFLEKIKNEDFLRKQRTFDNGSIPHQVHLTELKAIIRRQSEYYPFLKENLDRIEKILTFRIPYYVGPLAREKSDFAWMTRKTDDSIRPWNFEELVDKEASAEAFIHRMTNNDLYLPEEKVLPKHSLIYEKFTVYNELTKVRYKNEQGETYFFDSNIKQEIFDGVFKEHRKVSKKKLLDFLAKEYEEFRIVDVIGLDKENKAFNASLGTYHDLKKILDKDFLDNPDNESILEDIVQTLTLFEDREMIKKRLENYKDLFTESQLKKLYRRHYTGWGRLSAKLINGIRDKESQKTILDYLISDGRANRNFMQLIHDDGLSFKPIIDKAQAGSHSDNLKEVVGELAGSPAIKKGILQSLKIVDELVKVMGYEPEQVVVEMARENQTTNQGRRNTRQRYKLLEEGVKNLASNILKEYPTDNQALQNERLFLYYLQNGRDMYTGEALDIDNLSQYDIDHIVPQAFIKDDSIDNRVLVSSAKNRGKSDNVPSIDIVKARKAFWKKLLDAKLMSQRKYDNLTKAERGGLTSDDKARFIQRQLVETRQITKHVARILDERFNNELDSKGRRIRKVKIVTLKSNLVSNFRKEFGFYKIREVNDYHHAHDAYLNAVVAKAILTKYPQLEPEFVYGDYPKYNSYKTRKATEKLFFYSNIMNFFKTKVTLADGTVVVKDDIEVNNDTGEIVWDKKKHFATVRKVLSYPQVNIVKKTEIQTGGFSKESILAHGNSDKLIPRKTKDIYLDPKKYGGFDSPIVAYSVLVVADIKKGKAQKLKTVTELLGITIMERFRFEKNPSAFLESKGYLNIRDDKLMILPKYSLFELENGRRRLLASAGELQKGNELALPTQYMKFLYLASRYNELKGKPEEIEQKQEFVVQHVSYFDDILQIINDFSNRVILADANLEKINKLYQDNKENISVDELANNIINLFTFTSLGAPAAFKFFDKIVDRKRYTSTKEVLNSTLIHQSITGLYETRIDLGKLGED

SEQ ID NO: 88 - protein, 1365 aa, Streptococcus agalactiae
MNKPYSIGLDIGTNSVGWSIITDDYKVPAKKMRVLGNTDKEYIKKNLIGALLFDGGNTAADRRLKRTARRRYTRRRNRILYLQEIFAEEMSKVDDSFFHRLEDSFLVEEDKRGSKYPIFATLQEEKDYHEKFSTIYHLRKELADKKEKADLRLIYIALAHIIKFRGHFLIEDDSFDVRNTDISKQYQDFLEIFNTTFENNDLLSQNVDVEAILTDKISKSAKKDRILAQYPNQKSTGIFAEFLKLIVGNQADFKKYFNLEDKTPLQFAKDSYDEDLENLLGQIGDEFADLFSAAKKLYDSVLLSGILTVIDLSTKAPLSASMIQRYDEHREDLKQLKQFVKASLPEKYQEIFADSSKDGYAGYIEGKTNQEAFYKYLSKLLTKQEDSENFLEKIKNEDFLRKQRTFDNGSIPHQVHLTELKAIIRRQSEYYPFLKENQDRIEKILTFRIPYYIGPLAREKSDFAWMTRKTDDSIRPWNFEDLVDKEKSAEAFIHRMTNNDFYLPEEKVLPKHSLIYEKFTVYNELTKVRYKNEQGETYFFDSNIKQEIFDGVFKEHRKVSKKKLLDFLAKEYEEFRIVDVIGLDKENKAFNASLGTYHDLEKILDKDFLDNPDNESILEDIVQTLTLFEDREMIKKRLENYKDLFTESQLKKLYRRHYTGWGRLSAKLINGIRDKESQKTILDYLIDDGRSNRNFMQLINDDGLSFKSIISKAQAGSHSDNLKEVVGELAGSPAIKKGILQSLKIVDELVKVMGYEPEQIVVEMARENQTTNQGRRNSRQRYKLLDDGVKNLASNILKEYPTDNQALQNERLFLYYLQNGRDMYTGEALDIDNLSQYDIDHIIPQAFIKDDSIDNRVLVSSAKNRGKSDDVPSLEIVKDCKVFWKKLLDAKLMSQRKYDNLTKAERGGLTSDDKARFIQRQLVETRQITKHVARILDERFNNELDSKGRRIRKVKIVTLKSNLVSNFRKEFGFYKIREVNNYHHAHDAYLNAVVAKAILTKYPQLEPEFVYGDYPKYNSYKTRKATEKLFFYSNIMNFFKTKVTLADGTVVVKDDIEVNNDTGEIVWDKKKHFATVRKVLSYPQNNIVKKTEIQTGGFSKESILAHGNSDKLIPRKTKDIYLDPKKYGGFDSPIVAYSVLVVADIKKGKAQKLKTVTELLGITIMERSRFEKNLSAFLESKGYLNIRADKLIILPKYSLFELENGRRRLLASAGELQKGNELALPTQFMKFLYLASRYNESKGKPEEIEKKQEFVNQHVSYFDDILQLINDFSKRVILADANLEKINKLYQDNKENISVDELANNIINLFTFTSLGAPAAFKFFDKIIDRKRYTSTKEVLNSTLIHQSITGLYETRIDLGKLGED

SEQ ID NO: 89 - protein, 1365 aa, Streptococcus agalactiae
MNKPYSIGLDIGTNSVGWSIITDDYKVPAKKMRVLGNTDKEYIKKNLIGALLFDGGNTAADRRLKRTARRRYTRRRNRILYLQEIFAEEMSKVDDSFFHRLEDSFLVEEDKRGSKYPIFATLQEEKDYHEKFSTIYHLRKELADKKEKADLRLIYIALAHIIKFRGHFLIEDDSFDVRNTDISKQYQDFLEIFNTTFENNDLLSQNVDVEAILTDKISKSAKKDRILAQYPNQKSTGIFAEFLKLIVGNQADFKKYFNLEDKTPLQFAKDSYDEDLENLLGQIGDEFADLFSAAKKLYDSVLLSGILTVIDLSTKAPLSASMIQRYDEHREDLKQLKQFVKASLPEKYQEIFADSSKDGYAGYIEGKTNQEAFYKYLSKLLTKQEDSENFLEKIKNEDFLRKQRTFDNGSIPHQVHLTELKDIIRRQSEYYPFLKENQDRIEKILTFRIPYYIGPLAREKSDFAWMTRKTDDSIRPWNFEDLVDKEKSAEAFIHRMTNNDFYLPEEKVLPKHSLIYEKFTVYNELTKVRYKNEQGETYFFDSNIKQEIFDGVFKEHRKVSKKKLLDFLAKEYEEFRIVDVIGLDKENKAFNASLGTYHDLEKILDKDFLDNPDNESILEDIVQTLTLFEDREMIKKRLENYKDLFTESQLKKLYRRHYTGWGRLSAKLINGIRDKESQKTILDYLIDDGRSNRNFMQLINDDGLSFKSIISKAQAGSHSDNLKEVVGELAGSPAIKKGILQSLKIVDELVKVMGYEPEQIVVEMARENQTTNQGRRNSRQRYKLLDDGVKNLASNILKEYPTDNQALQNERLFLYYLQNGRDMYTGEALDIDNLSQYDIDHIIPQAFIKDDSIDNRVLVSSAKNRGKSDDVPSLEIVKDCKVFWKKLLDAKLMSQRKYDNLTKAERGGLTSDDKARFIQRQLVETRQITKHVARILDERFNNELDSKGRRIRKVKIVTLKSNLVSNFRKEFGFYKIREVNNYHHAHDAYLNAVVAKAILTKYPQLEPEFVYGDYPKYNSYKTRKATEKLFFYSNIMNFFKTKVTLADGTVVVKDDIEVNNDTGEIVWDKKKHFATVRKVLSYPQNNIVKKTEIQTGGFSKESILAHGNSDKLIPRKTKDIYLDPKKYGGFDSPIVAYSVLVVADIKKGKAQKLKTVTELLGITIMERSRFEKNPSAFLESKGYLNIRADKLIILPKYSLFELENGRRRLLASAGELQKGNELALPTQFMKFLYLASRYNESKGKPEEIEKKQEFVNQHVSYFDDILQLINDFSKRVILADANLEKINKLYQDNKENISVDELANNIINLFTFTSLGAPAAFKFFDKIVDRKRYTSTKEVLNSTLIHQSITGLYETRIDLGKLGED

SEQ ID NO: 90 - protein, 1365 aa, Streptococcus agalactiae 138P
MNKPYSIGLDIGTNSVGWSIITDDYKVPAKKMRVLGNTDKEYIKKNLIGALLFDGGNTAADRRLKRTARRRYTRRRNRILYLQEIFAEEMSKVDDSFFHRLEDSFLVEEDKRGSKYPIFATMQEEKDYHEKFPTIYHLRKELADKKEKADLRLVYLALAHIIKFRGHFLIEDDRFDVRNTDIQKQYQAFLEIFDTSFENNHLLSQNVDVEAILTDKISKSAKKDRILAQYPNQKSTGIFAEFLKLIVGNQADFKKHFNLEDKTPLQFAKDSYDEDLENLLGQIGDEFADLFSAAKKLYDSVLLSGILTVTDLSTKAPLSASMIQRYDEHREDLKQLKQFVKASLPEKYQEIFADSSKDGYAGYIEGKTNQEAFYKYLSKLLTKQEDSEYFLEKIKNEDFLRKQRTFDNGSIPHQVHLTELKAIIRRQSEYYPFLKENQDKIEKILTFRIPYYVGPLARGNSDFAWMTRKTDDSIRPWNFEDLVDKEKSAEAFIHRMTNNDLYLPEEKVLPKHSLIYEKFTVYNELTKVRYKNEQGETYFFDSNVKQEIFDGVFKEHRKVSKKQLLDFLAKEFEEFRIVDVTGLDKENKAFNASLGTYHDLKKILDKDFLDNPDNESILEDIVQTITLFEDREMIKKRLENYKDLFTESQLKKLYRRHYTGWGRLSAKLINGIRDRESQKIILDYLISDGRANRNFMQLINDDGLSFKSIISKAQSGSHSDNLKEVVGELAGSPAIKKGILQSLKIVDELVKVMGYEPEQIVVEMARENQTTNQGRRNSRQRYKLLEDGVKNLASDILKEYPTDNQALQNERLFLYYLQNGRDMYTGEALDIDSLSQYDIDHIVPQAFIKDDSIDNRVLVSSAKNRGKSDDVPSIDIVKARKAFWKKLLDAKLISQRKYDNLTKAERGGLTPDDKAGFIQRQLVETRQITKHVARILDERFNNKVDDNNKPIRKVKIVTLKSNLVSNFRKEFGFYKIREVNNYHHAHDAYLNAVVAKAILTKYPQLEPEFVYGDYPKYNSYKTRKATEKLFFYSNIMNFFKTKVTLADETVVVKDDIEVNNETGEIAWDKKKHFATVRKVLSYPQVNIVKKTEVQTGGFSKESILAHSNSDKLIPRKTKDIYLDPKKYGGFDSPIVAYSVLVLADIKKGKAQKLKTVKELIGITIMERERFEKNPSAFLESKGYLNIRTDKLIILPKYSLFELENGRRRLLASAGELQKGNELALPTQYMKFLYLASRYNESKGKPEEIEKKQEFVNQHVSYFDDILQLINDFSKRVILADANLEKINKLYSDNKDNTPVDELAKNIINLFTFTSLGAPAAFKFFDKSVDRKRYTSTKEVLDSTLIHQSITGLYETRIDLGKLGED

SEQ ID NO: 91 - protein, 1365 aa, Streptococcus agalactiae H36B
  misc_feature (9)..(9): Xaa can be any naturally occurring amino acid
MNKPYSIGXDIGTNSVGWSIITDDYKVPAKKMRVLGNTDKEYIKKNLIGALLFDGGNTAADRRLKRTARRRYTRRRNRILYLQEIFAEEMSKVDDSFFHRLEDSFLVEEDKRGSKYPIFATLQEEKDYHEKFSTIYHLRKELADKKEKADLRLIYIALAHIIKFRGHFLIEDDSFDVRNTDISKQYQDFLEIFNTTFENNDLLSQNVDVEAILTDKISKSAKKDRILAQYPNQKSTGIFAEFLKLIVGNQADFKKYFNLEDKTPLQFAKDSYDEDLENLLGQIGDEFADLFSAAKKLYDSVLLSGILTVIDLSTKAPLSASMIQRYDEHREDLKQLKQFVKASLPEKYQEIFADSSKDGYAGYIEGKTNQEAFYKYLSKLLTKQEDSENFLEKIKNEDFLRKQRTFDNGSIPHQVHLTELKAIIRRQSEYYPFLKENQDRIEKILTFRIPYYIGPLAREKSDFAWMTRKTDDSIRPWNFEDLVDKEKSAEAFIHRMTNNDFYLPEEKVLPKHSLIYEKFTVYNELTKVRYKNEQGETYFFDSNIKQEIFDGVFKEHRKVSKKKLLDFLAKEYEEFRIVDVIGLDKENKAFNASLGTYHDLEKILDKDFLDNPDNESILEDIVQTLTLFEDREMIKKRLENYKDLFTESQLKKLYRRHYTGWGRLSAKLINGIRDKESQKTILDYLIDDGRSNRNFMQLINDDGLSFKSIISKAQAGSHSDNLKEVVGELAGSPAIKKGILQSLKIVDELVKVMGYEPEQIVVEMARENQTTNQGRRNSRQRYKLLDDGVKNLASNILKEYPTDNQALQNERLFLYYLQNGRDMYTGEALDIDNLSQYDIDHIIPQAFIKDDSIDNRVLVSSAKNRGKSDDVPSLEIVKDCKVFWKKLLDAKLMSQRKYDNLTKAERGGLTSDDKARFIQRQLVETRQITKHVARILDERFNNELDSKGRRIRKVKIVTLKSNLVSNFRKEFGFYKIREVNNYHHAHDAYLNAVVAKAILTKYPQLEPEFVYGDYPKYNSYKTRKATEKLFFYSNIMNFFKTKVTLADGTVVVKDDIEVNNDTGEIVWDKKKHFATVRKVLSYPQNNIVKKTEIQTGGFSKESILAHGNSDKLIPRKTKDIYLDPKKYGGFDSPIVAYSVLVVADIKKGKAQKLKTVTELLGITIMERSRFEKNPSAFLESKGYLNIRADKLIILPKYSLFELENGRRRLLASAGELQKGNELALPTQFMKFLYLASRYNESKGKPEEIEKKQEFVNQHVSYFDDILQLINDFSKRVILADANLEKINKLYQDNKENISVDELANNIINLFTFTSLGAPAAFKFFDKIVDRKRYTSTKEVLNSTLIHQSITGLYETRIDLGKLGED

SEQ ID NO: 92 - protein, 1365 aa, Streptococcus agalactiae ILRI112
MNKPYSIGLDIGTNSVGWSIITDDYKVPAKKMRVLGNTDKEYIKKNLIGALLFDGGNTAADRRLKRIARRRYTRRRNRILYLQEIFAEKMSKVDDSFFHRLEDSFLVEEDKRGSKYPIFATLQEEKDYHEKFPTIYHLRKELADKKEKADLRLVYLALAHIIKFRGHFLIEDDRFDVRNTDIQKQYQAFLEIFDTTFENNHLLSQNVDVEAILTDKISKSAKKDRILAQYPDQKSTGIFAEFLKLIVGNQADFKKHFNLEDKTPLQFAKDSYDEDLENLLGQIGDEFADLFSAAKKLYDSVLLSGILTVTDLSTKAPLSASMIQRYDEHREDLKQLKQFVKASLPEKYQEIFADSSKDGYAGYIEGKTNQEAFYKYLSKLLTKQEGSEYLLEKIKNEDFLRKQRTFDNGSIPHQVHLTELRAIIRRQSEYYPFLKENLDRIEKILTFRIPYYVGPLAREKSDFAWMTRKTDDSIRPWNFEELVDKEASAEAFIHCMTNNDLYLPEEKVLPKHSLIYEKFTVYNELTKVRYKNEQGETYFFDSNIKQEIFDGVFKEYRKVSKKQLLDFLAKEFEEFRIVDVTGLDKENKAFNASLGTYHDLEKILGKDFLDNPDNESILEDIVQTLTLFEDREMIKKRLDIYKDFFTESQLKKLYRRHYTGWGRLSAKLINGIRNKENQKTILDYLIDDGSANRNFMQLIKDAGLSFKSIISKAQSGSHSDNLKEVVSELAGSPAIKKGILQSLKIVDELVKVMGYKPEQIVVEMARENQTTNQGRRNSRQRYKLLDDGVRNLASNILKEYPTDNQALQNERLFLYYLQNGRDMYTEKALDIDNLSQYDIDHIIPQAFIKDDSIDNRVLVSSAKNRGKSDDVPSLEIVKDCKVFWKKLLDAKLMSQRKYDNLTKAERGGLTSDDKARFIQRQLVETRQITKHVARILDERFNNELDSKGRRIRKVKIVTLKSNLVSNFRKEFGFYKIREVNDYHHAHDAYLNAVVAKAILTKYPQLEPEFVYGDYPKYNSYKTRKATEKLFFYSNIMNFFKTKVTLADGTVVVKDDIEVNNDTGEIVWDKKKHFATVRKVLSYPQNNIVKKTEIQTGGFSKESILAHGNSDKLIPRKTKDIYLDPKKYGGFDSPIVAYSVLVVADIKKGKAQKLKTVTELLGITIMERSRFEKNPSAFLESKGYLNIRTDKLIILPKYSLFELENGRRRLLASAGELQKGNELALPTQFMKFLYLASRYNESKGKPEEIEKKQEFVNQHVSYFDDILQIINDFSNRVILADANLEKINKLYQDNKENISVDELANNIINLFTFTSLGAPAAFKFFDKIVDRKRYTSTKEVLNSTLIHQSITGLYETRIDLGKLGED

SEQ ID NO: 93 - protein, 1351 aa, Streptococcus anginosus
MNQKYSIGLDIGTNSVGWAVITDDYKVPAKKMKVLGNTDKQSIKKNLLGALLFDSGETAEATRLKRTARRRYTRRRNRLRYLQEIFAEEMMQVDESFFQRLDDSFLVDEDKRGERHPIFGNIAAEVKYHDEFPTIYHLRKHLADISQKADLRLVYLALAHMIKFRGHFLIEGQLKAENTNVQALFKDFVEVYDKTVEESHLSEITVDALSILTEKVSKSRRLENLIAHYPAEKKNTLFGNLIALFLGLQPNFKTNFQLSEDAKLQFSKDTYEEDLEGLLGEVGDEYADLFASAKNLYDAILLSGILTVDDNSTKAPLSASMVKRYEEHQKDLKKFEDFIKVNALDQYNAIFKDKNKKGYAGYIESGVKQDEFYKYLKGILLQINGSGDFLDKIDREDFLRKQRTFDNGSIPHQIHLQEMHAILRRQGEHYPFLKENQDKIEKILTFRIPYYVGPLARKGSRFAWAEYKADEKITPWNFDDILDKEKSAEKFITRMTLNDLYLPEEKVLPKHSLLYETFTVYNELTKVKYVNEQGEAKFFDANMKQEIFDHVFKENRKVTKDKLLNYLNKEFEEFRIVNLTGLDKENKVFNSSLGTYHDLRKILNKSFLDNKENAQIIEDIIQTLTLFEDREMIRQRLQKYSDIFTKAQLKKLERRHYTGWGRLSYKLINGIRNKENKKTILDYLIDDGYANRNFMQLINDDALSFKEEIAKAQIIGDVDDIANVVHDLPGSPAIKKGILQSVKIVDELVKVMGHNPANIIIEMARENQTTDRGRRNSQQRLKLLQDSLKPVNIKNVENQQLQNDRLFLYYIQNGKDMYTGETLDINNLSQYDIDHIIPQAYIKDDSFDNRVLTSSSENRGKSDNVPSIEVVCARKADWMRLRKAGLISQRKFDNLTKAERGGLTENDKAGFIKRQLVETRQITKHVAQVLDARFNAKHDENKKVIRDVKIITLKSNLVSQFRKDFKFYKVREINDYHHAHDAYLNAVIGTALLKKYPKLASEFVYGEFKKYDVSDKEIGKATAKYFFYSNLMNFFKKEVKFADGTVVERPDIETSEDGEIAWNKQTDFKIVRKVLSYPQVNIVKKTEVQTHGLDRPSPKPKPDSSENLVGVKRNLDPKKYGGYAGISNSYAVLVKAIIEKGVKKKETMVLEFQGISILDRITFEKDKRAFLLGKGYKDIKKIIELPKYSLFELKDGSRRMLASRGEIHKGNELFVPQKFTTLLYHAKRINNPINKDHIEYVKKHRDDFKELLNYVLEFNEKYVGATKNGERLKEAVADFDSKSNEEICTSFLGLFELTSLGSASDFEFLGVKIPRYRDYTPSSLLKDSTLIHQSITGLYETRIDLSKLGED

SEQ ID NO: 94 - protein, 1341 aa, Streptococcus anginosus
MKKEYSIGLDIGTNSVGWAVITDDYKVPAKKMKVLGNTDKQSIKKNLLGALLFDSGETAEATRLKRTARRRYTRRKNRLRYLQEIFTEEMNKVDENFFQRLDDSFLVEEDKQGSKYPIFGTLKEEKEYHKKFKTIYHLREELANSKEKADLRLVYLALAHMIKFRGHFLYEGDLKAENTDVQALFKDFVEEYDKTIEESHLSEITVDALSILTEKVSKSSRLENLIAHYPTEKKNTLFGNLIALSLGLQPNFKTNFQLSEDAKLQFSKDTYEEDLEELLGEIGDEYADLFASAKNLYDAILLSGILAVDDNTTKAPLSASMVKRYEEHQKDLKKLKDFIKVNAPDQYNAIFKDKNKKGYAGYIESGVEQDEFYKYLKGILLKINGSGDFLDKIDCEDFLRKQRTFDNGSIPHQIHLQEMHAILRRQGEHYPFLKENQDKIEKILTFRIPYYVGPLARKGSRFAWAEYKADEKITPWNFDDILDKEKSAEKFITRMTLNDLYLPEEKVLPKHSPLYETFTVYNELTKVKYVNEQGEAKFFDTNMKQEIFDHVFKENRKVTKDKLLNYLNKEFEEFRIVNLTGLDKENKAFNSSLGTYHDLRKILDKSFLDDKANEKTIEDIIQTLTLFEDREMIRQRLQKYSDIFTKAQLKKLERRHYTGWGRLSYKLINGIRNKENKKTILDYLIDDGYANRNFMQLINDDALSFKEEIARAQIIGDVDDIANVVHDLPGSPAIKKGILQSVKIVDELVKVMGHNPANIIIEMARENQTTDKGRRNSQQRLKLLQDSLKPVNIKNVENQQLQNDRLFLYYIQNGKDMYTGETLDINNLSQYDIDHIIPQAFIKDNSLDNRVLTRSDKNRGKSDDVPSIEVVHEMKSFWSKLLSVKLITQRKFDNLTKAERGGLTEEDKAGFIKRQLVETRQITKHVAQILDERFNTEFDGAQRRIRNVKIITLKSNLVSNFRKEFELYKVREINDYHHAHDAYLNAVVGNALLLKYPQLEPEFVYGEYPKYNSYRSRKSATEKFLFYSNILRFFKKEDIQTNEDGEIAWNKEKHIKILRKVLSYPQVNIVKKTEEQTGGFSKESILPKGESDKLIPRKTKNSYWNPKKYGGFDSPVVAYSILVFADVEKGKSKKLRKVQDMVGITIMEKKRFEKNPVDFLEQRGYRNVRLEKIIKLPKYSLFELENKRRRLLASARELQKGNELVIPQRFTTLLYHSYQIEKNYEPEHREYVEKHKDEFKELLEYISVFSRKYVLADNNLTKIEMLFSKNKDAEVSSLAKSFISLLTFTAFGAPAAFNFFGENIDRKRYTSVTECLNATLIHQSITGLYETRIDLSKLGED

SEQ ID NO: 95 - protein, 1341 aa, Streptococcus anginosus
MKKEYSIGLDIGTNSVGWAVITDDYKVPAKKMKVLGNTDKQSIKKNLLGALLFDSGETAEATRLKRTARRRYTRRRNRLRYLQEIFAEEMMQVDESFFQRLDDSFLVEEDKRGSRYPIFGNIAAEVKYHDDFPTIYHLRKHLVDISQKADLRLVYLALAHMIKFRGHFLIEGQLKAENTNVQALFKDFVEVYDKTVEESHLSEMTVDALSILTEKVSKSRRLENLVECYPTEKKNTLFGNLIALSLGLQPNFKTNFQLSEDAKLQFSKDTYEEDLEGLLGEIGDEYADLFASAKNLYDAILLSGILAVDDNTTKAPLSASMVKRYEEHQKDLKKLKDFIKVNAPAQYDDIFKDETKNGYAGYIENGVKQDEFYKYLKNTLSKIDGSDYFLDKIDREDFLRKQRTFDNGSIPHQIHLQEMHAILRRQGEHYPFLKENQDKIEKILTFRIPYYVGPLARKGSRFAWAEYKADEKITPWNFDDILDKEKSAEKFITRMTLNDLYLPEEKVLPKHSPLYETFTVYNELTKVKYVNEQGEAKFFDTNMKQEIFDHVFKENRKVTKDKLLNYLNKEFEEFRIVNLTGLDKENKAFNASLGTYHDLRKILDKSFLDDKVNEKIIEDIIQTLTLFEDREMIRQRLQKYSDIFTTQQLKKLERRHYTGWGRLSYKLINGIRNKENKKTILDYLIDDGYANRNFMQLINDDALSFKEEIARAQIIGDVDDIANVVHDLPGSPAIKKGILQSVKIVDELVKVMGHNPANIIIEMARENQTTDKGRRNSQQRLKLLQDSLKPVNIKNVENQQLQNDRLFLYYIQNGKDMYTGETLDINNLSQYDIDHIIPQAFIKDNSLDNRVLTRSDKNRGKSDDVPSIEVVHEMKSFWSKLLSVKLITQRKFDNLTKAERGGLTEEDKAGFIKRQLVETRQITKHVAQILDERFNTEFDGAQRRIRNVKIITLKSNLVSNFRKEFELYKVREINDYHHAHDAYLNAVVGNALLLKYPQLEPEFVYGEYPKYNSYRSRKSATEKFLFYSNILRFFKKEDIQTNEDGEIAWNKEKHIKILRKVLSYPQVNIVKKTEEQTGGFSKESILPKGESDKLIPRKTKNSYWNPKKYGGFDSPVVAYSILVFADVEKGKSKKLRKVQDMVGITIMEKKRFEKHPVDFLEQRGYRNVRLEKIIKLPKYSLFELENKRRRLLASARELQKGNELVIPQRFTTLLYHSYRIEKDYEPEHREYVEKHKDEFKELLEYISVFSRKYVLADNNLTKIEMLFSKNKDAEVSSLAKSFISLLTFTAFGAPAAFNFFGENIDRKRYTSVTECLNATLIHQSITGLYETRIDLSKLGED

SEQ ID NO: 96 - protein, 1341 aa, Streptococcus anginosus T5; identical to SEQ ID NO: 94

SEQ ID NO: 97 - protein, 1360 aa, Streptococcus caballi
MTKKNYSIGLDIGTNSVGWAVITDDYKVPAKKMKVLGNTDKKYIKKNLLGALLFDSGETAEATRLKRTARRRYTRRKNRLRYLQDIFTEEMAKVDDSFFQRLDESFLTDNDKNFDSHPIFGNKAEEDAYHQKFPTIYHLRKHLADSTEKADLRLVYLALAHMIKFRGHFLIEGELNAENTDVQKLFTDFVGVYDRTFDDSHLSEITVDAASILTEKISKSRRLENLINNYPKEKKNTLFGNLIALALGLQPNFKTNFKLSEDAKLQFSKDTYEEDLEELLGKIGDDYADLFTSSKNLYDAILLSGILTVDDNSTKAPLSASMIKRYVEHHEDLEKLKEFIKANKSELYHDIFKDKTQNGYAGYIENGVKQDEFYKYLKGILTKINGSDYFLDKIEREDFLRKQRTFDNGSIPHQIHLQEMHAILRRQGDYYPFLKENQEEIEKILTFRIPYYVGPLARKDSRFAWAEYRSDEKITPWNFDKVIDKEKSAEKFITRMTLNDLYLPEEKVLPKHSHVYETFAVYNELTKVKYVNEQGKDSFFDSNMKQEIFDHVFKENRKVTKEKLLNYLDKEFPEYRIQDLVGLDKENKSFNASLGTYHDLKKILDKSFLDDKVNEEVIEDIIKTLTLFEDREMIQQRLQKYSDIFTKQQLKKLERRHYTGWGRLSYKLINGIRNKENNKTILDYLIDDGSANRNFMQLINDDALSFKQIIQEAQVVGDVDDIETVVHDLPGSPAIKKGILQSVKIVDELIKVMGDNPDNIVIEMARENQTTNRGRSQSQQRLKKLQNSLKPSYIEDKVENSHLQNDQLFLYYIQNGKDMYTGDELDIDHLSDYDIDHIIPQAFIKDDSIDNRVLTSSAKNRGKSDDVPSLGIVRARKAEWVRLYKSGLISKRKFDNLTKAERGGLTEADKAGFIKRQLVETRQITKHVAQILDARFNTERDENDKVIRDVKVITLKSNLVSQFRKEFKFYKVREINDYHHAHDAYLNAVVGTALLKKYPKLAPEFVYGEYKKYDVSSDDHSEMGKATAKYFFYSNLMNFFKRVIRYSNGKVIVRPVVEYSKDTGEIAWNKRTDFEKVRKVLSYPQVNIVKKVETQTGGFSKESILPKGDSDKLIPRKTKKVLWEPKKYGGFDSPTVAYSVLVVADVEKGKTKKLKTVKELVGISIMERSFFEKNPVEFLKNKGYQNVQEDKLMKLPKYSLFEFEGGRRRLLASATELQKGNEIMLSAHLVALLYHAHRIGNFNSAEHLKYVSEHKKEFEEVLSCVENFANVYVDVEKNLSKIRAAADSMDNFSIEEISDSFINLLTLTALGAPADFNFLGEKIPRKRYNSTKECLNATLIHQSITGLYETRIDLSKLGEE

SEQ ID NO: 98 - protein, 1355 aa, Streptococcus canis
MEKKYSIGLDIGTNSVGWAVITDDYKVPSKKFKVLGNTNRKSIKKNLMGALLFDSGETAEATRLKRTARRRYTRRKNRIRYLQEIFANEMAKLDDSFFQRLEESFLVEEDKKNERHPIFGNLADEVAYHRNYPTIYHLRKKLADSPEKADLRLIYLALAHIIKFRGHFLIEGKLNAENSDVAKLFYQLIQTYNQLFEESLDEIEVDAKGILSARLSKSKRLEKLIAVFPNEKKNGLFGNIIALALGLTPNFKSNFDLTEDAKLQLSKDTYDDDLDELLGQIGDQYADLFSAAKNLSDAILLSDILRSNSEVTKAPLSASMVKRYDEHHQDLALLKTLVRQQFPEKYAEIFKDDTKNGYAGYVGIGATQEEFYKFIKPILEKMDGAEELLAKLNRDDLLRKQRTFDNGSIPHQIHLKELHAILRRQEEFYPFLKENREKIEKILTFRIPYYVGPLARGNSRFAWLTRKSEEAITPWNFEEVVDKGASAQSFIERMTNFDEQLPNKKVLPKHSLLYEYFTVYNELTKVKYVTERMRKPEFLSGEQKKAIVDLLFKTNRKVTVKQLKEDYFKKIECFDSVEIIGVEDRFNASLGTYHDLLKIIKDKDFLDNEENEDILEDIVLTLTLFEDREMIEERLKTYAHLFDDKVMKQLKRRHYTGWGRLSRKMINGIRDKQSGKTILDFLKDGFSNRNFMQLIHDDSLTFKEEIEKAQVSGQGDSLHEQIADLAGSPAIKKGILQTVKIVDELVKVMGHKPENIVIEMARENQTTTKGLQQSRERKKRIEEGIKELESQILKENPVENTQLQNEKLYLYYLQNGRDMYVDQELDINRLSDYDVDHIVPQSFIKDDSIDNKVLTRSVENRGKSDNVPSEEVVKKMKNYWRQLLNAKLITQRKFDNLTKAERGGLSEADKAGFIKRQLVETRQITKHVARILDSRMNTKRDKNDKPIREVKVITLKSKLVSDFRKDFQLYKVRDINNYHHAHDAYLNAVVGTALIKKYPKLESEFVYGDYKVYDVSEQEIGKATAKRFFYSNIMNFFKTEVKLANGEIRKRPLIETNGETGEVVWNKEKDFATVRKVLAMPQVNIVKKTEVQTGGFSKESILSKRESAKLIPRKKGWDTRKYGGFGSPTVAYSILVVAKVEKGKAKKLKSVKVLVGITIMEKGSYEKDPIGFLEAKGYKDIKKELIFKLPKYSLFELENGRRRMLASELQKANELVLPQHLVRLLYYTQNISATTGSNNLGYIEQHREEFKEIFEKIIDFSEKYILKNKVNSNLKSSFDEQFAVSDSILLSNSFVSLLKYTSFGASGGFTFLDLDVKQGRLRYQTVTEVLDATLIYQSITGLYETRTDLSQLGGD

SEQ ID NO: 99 - protein, 1341 aa, Streptococcus constellatus
MGKPYSIGLDIGTNSVGWAVVTDDYKVPAKKMKVLGNTDKQSIKKNLLGALLFDSGETAEATRLKRTARRRYTRRKNRLRYLQEIFTGEMNKVDENFFQRLDDSFLVDEDKRGEHHPIFGNIAAEVKYHDDFPTIYHLRRHLADTSKKADLRLVYLALAHMIKFRGHFLYEGDLKAENTDVQALFKDFVEEYDKTIEESHLSEITVDALSILTEKVSKSSRLENLIAHYPTEKKNTLFGNLIALSLDLHPNFKTNFQLSEDAKLQFSKDTYEEDLEGFLGEVGDEYADLFASAKNLYDAILLSGILTVDDNSTKAPLSASMVKRYEEHQKDLKKLKDFIKVNAPDQYNAIFKDKNKKGYASYIESGVKQDEFYKYLKGILLKINGSGDFLDKIDREDFLRKQRTFDNGSIPHQIHLQEMHAILRRQGEHYPFLKENQDKIEKILTFRIPYYVGPLARKGSRFAWAEYKADEKITPWNFDDILDKEKSAEKFITRMTLNDLYLPEEKVLPKHSPLYEAFTVYNELTKVKYVNEQGEAKFFDTNMKQEIFDHVFKENRKVTKDKLLNYLNKEFEEFRIVNLTGLDKENKAFNSSLGTYHDLRKILDKSFLDDKANEKTIEDIIQTLTLFEDREMIRQRLQKYSDIFTKAQLKKLERRHYTGWGRLSYKLINGIRNKENKKTILDYLIDDGYANRNFMQLINDDALSFKEEIARAQIIDDVDDIANVVHDLPGSPAIKKGILQSVKIVDELVKVMGHNPANIIIEMARENQTTDKGRRNSQQRLKLLQDSLKPVNIKNVENQQLQNDRLFLYYIQNGKDMYTGETLDINNLSQYDIDHIIPQAFIKDNSLDNRVLTRSDKNRGKSDDVPSIEVVHEMKSFWSKLLSVKLITQRKFDNLTKAERGGLTEEDKAGFIKRQLVETRQITKHVAQILDERFNTEFDGNKRRIRNVKIITLKSNLVSNFRKEFELYKVREINDYHHAHDAYLNAVVGNALLLKYPQLEPEFVYGEYPKYNSYRSRKSATEKFLFYSNILRFFKKEDIQTNEDGEIAWNKEKHIKILRKVLSYPQVNIVKKTEEQTGGFSKESILPKGESDKLIPRKTKNSYWDPKKYGGFDSPVVAYSILVFADVEKGKSKKLRKVQDMVGITIMEKKRFEKNPVDFLEQRGYRNVRLEKIIKLPKYSLFELENKRRRLLASAKELQKGNELVIPQRFTTLLYHSYRIEKDYEPEHREYVEKHKDEFKELLEYISVFSRKYVLADNNLTKIEMLFSKNKDAEVSSLAKSFISLLTFTAFGAPAAFNFFGENIDRKRYTSVTECLNATLIHQSITGLYETRIDLSKLGED

SEQ ID NO: 100 - protein, 1355 aa, Streptococcus constellatus
MTQKYSIGLDIGTNSVGWAIVTDDYKVPAKKMKILGNTNKQYIKKNLLGALLFDSGETAKATRLKRTARRRYTRRKNRLRYLQEIFIEEMNKVDENFFQRLDDSFLVTEDKRGSKYPIFGTLKEEKEYYKEFETIYHLRKRLADSTGKVDLRLVYLALAHMIKFRGHFLIEGQLKAENTDVQTLFNDFVEVYDKTIEESHLAEITVDALSILTEKVSKSRRLENLVKCYPTEKKNTLFGNLIALSLGLQPNFKTNFQLSEDAKLQFSKDTYEEDLEELLGKIGDDYADLFTSAKNLYDTILLSGILAVDDNSTKALLSASMIKRYEEHQKDLKKLKDFIKVNAPAQYDDIFKDETKNGYAGYIENGVKQDEFYKYLKNTLSKIDGSGYFLDKIEREDFLRKQRTFDNGSIPHQIHLQEMHAILRRQGEHYPFLKENQDKIEKILTFRIPYYVGPLVRKGSRFAWAEYKADEKITPWNFDDILDKEKSAEKFITRMTLNDLYLPEEKVLPKHSLLYEIFTVYNELTKVKYVNEQGEAKFFDANMKQEIFDHVFKENPKVTKDKLLNYLDKEFDEFRIVDLTGLDKENKAFNASLGTYHDLRKILDKSFLDDKANEKTIEDIIQTLTLFEDREMIRQRLQKYSDIFTKAQLKKLERRHYTGWGRLSYKLINGIRNKENNKTILEYLVDDGYANRNFMQLINDDTLPFKQIIKDAQAIDDVDDIELIVHDLPGSPAIKKGILQSIKIVDELVKVMGYNPDNIVIEMARENQTTTKGRRNSQQRLKLLQDSLTPVSIKNVENQQLQNDRLFLYYIQNGKDMYTGEELDIHHLSDYDIDHIIPQAFIKDDSIDNRVLTSSAKNRGKSDNVPNLEVVCDRKADWIRLREAGLISQRKFDNLTKAERGGLTENDKAGFIHRQLVETRQITKHVAQILDARFNPKRDDNKKVIRDVKIITLKSNLVSQFRRDFKLYKVREINDYHHAHDAYLNAVVGTALLKKYPKLTSEFVYGEYKKYDVSDNDEIGKATAKYFFYSNLMNFFKTEVKFADGTVVERPDIETSEDGEIAWNKQTDFKIVRKVLSYPQVNIVKKVEKQTGRFSKESILPKGDSDKLIARKTKENYWDTKKYGGFDSPTVAYSVLVVADIKKGKAKKLKTVKELVGISIMERPFFEKNPIMFLESKGYRNIQKDKLIKLPKYSLFEFEGGRRRLLASAVELQKGNEMVLPQYLNNLLYHAHRIDNSDNSEHLKYITEHKEEFGKLLSYIENFAKSYVDVDKNLEKIQLAVEKIDSFSVKEISNSFIHLLTLTALGAPADFNFLGEKIPRKRYTSTKECLNATLIHQSITGLYETQTDLSKLGED

SEQ ID NO: 101 - protein, 1356 aa, Streptococcus dysgalactiae
MDKKYSIGLDIGTNSVGWAVITDDYKVPSKKFKVLGNTDRHSIKKNLIGALLFDSGETAEATRLKRTARRRYTRRKNRIRYLQEIFSSEMSKVDDSFFHRLEESFLVEEDKKHERHPIFGNIVDEVAYHEKYPTIYHLRKKLADSTDKADLRLIYLALAHMIKFRGHFLIEGDLNPDNSDMDKLFIQLVQTYNQLFEENINASRVDAKAILSARLSKSRRLENLIAQLPGEKRNGLFGNLIALSLGLTPNFKSNFDLAEDAKLQLSKDTYDDDLDNLLAQIGDQYADLFLAAKNLSDAILLSDILRVNSEITKAPLSASMIKRYDEHHQDLTLLKALVRQQLPEKYKEIFFDQSKNGYAGYIDGGASQEEFYKFIKPILEKMDGTEELLAKLNREDLLRKQRTFDNGSIPHQIHLGELHAILRRQEDFYPFLKDNREKIEKILTFRIPYYVGPLARGNSRFAWMTRKSEETITPWNFEEVVDKGASAQSFIERMTNFDKNLPNEKVLPKHSLLYEYFTVYNELTKVKYVTEGMRKPEFLSGKQKEAIVDLLFKTNRKVTVKQLKEDYFKKIECFDSVEISGVEDRFNASLGTYHDLLKIIKDKDFLDNEENEDILEDIVLTLTLFEDKEMIEERLKKYANLFDDKVMKQLKRRHYTGWGRLSRKLINGIRDKQSGKTILDFLKDGFANRNFMQLINDDSLTFKEAIQKAQVSGQGHSLHEQIANLAGSPAIKKGILQSVKVVDELVKVMGHKPENIVIEMARENQTTQKGQKNSRERMKRIEEGIKELGSQILKEHPVENTQLQNEKLYLYYLQNGRDMYVDQELDINRLSDYDVDHIVPQSFIKDDSIDNKILTRSDKNRGKSDNVPSEEVVKKMKNYWRQLLNAKLITQRKFDNLTKAERGGLSELDKAGFIKRQLVETRQITKHVAQILDSRMNTKYDENDKLIREVKVITLKSKLVSDFRKDFQFYKVREINNYHHAHDAYLNAVVGTALIKKYTKLESEFVYGDYKVYDVSEQEIGKATAKRFFYSNIMNFFKTEITLANGEIRKRPLIETNEETGEIVWDKGRDFATVRKVLSMPQVNIVKKTEVQTGALTNESIYARGSFDKLISRKHRFESSKYGGFGSPTVTYSVLVVAKSKVQDGKVKKIKTGKELIGMTLLDKLVFEKNPLKFIEDKGYGNVQIDKCIKLPKYSLFEFENGTRRMLASRGDLQKANEMFLPAKLVTLLYHAHKIESSKELEHEAYILDHYNDLYQLLSYIERFASLYVDVEKNISKVKELFSNIESYSISEICSSVINLLTLTASGAPADFKFLGTTIPRKRYGSPQSILSSTLIHQSITGLYETRIDLSQLGGD

SEQ ID NO: 102 - protein, 1356 aa, Streptococcus dysgalactiae
MDKKYSIGLDIGTNSVGWAVITDDYKVPSKKFKVLGNTDRHSIKKNLIGALLFDSGETAEATRLKRTARRRYTRRKNRIRYLQEIFSSEMSKVDDSFFHRLEESFLVEEDKKHERHPIFGNIVDEVAYHEKYPTIYHLRKKLADSTDKADLRLIYLALAHMIKFRGHFLIEGDLNPDNSDVDKLFIQLVQTYNQLFEEKINASGVDAKAILSARLSKSKRLENLIAQLPGEKKNGLFGNLIALSLGLTPNFKSNFDLAEDAKLQLSKDTYDDDLDNLLAQIGNQYADLFLAAKNLSDAILLSDILRVNSEITKAPLSASMIKRYDEHHQDLTLLKALVRQQLPEKYKEIFFDQSKNGYAGYIDGGASQEEFYKFIKPILEKMDGTEELLAKLNREDLLRKQRTFDNGSIPHQIHLGELHAILRRQEDFYPFLKDNREKIEKILTFRIPYYVGPLARGNSRFAWMTRKSEETITPWNFEEVVDKGASAQSFIERMTNFDKNLPNEKVLPKHSLLYEYFTVYNELTKVKYVTEGMRKPEFLSGKQKEAIVDLLFKTNRKVTVKQLKEDYFKKIECFDSVEISGVEDRFNASLGTYHDLLKIIKDKDFLDNEENEDILEDIVLTLTLFEDKEMIEERLKKYANLFDDKVMKQLKRRHYTGWGRLSRKLINGIRDKQSGKTILDFLKDGFANRNFMQLINDDSLTFKEAIQKAQVSGQGHSLHEQIANLAGSPAIKKGILQSVKVVDELVKVMGHKPENIVIEMARENQTTQKGQKNSRERMKRIEEGIKELGSQILKEHPVENTQLQNEKLYLYYLQNGRDMYVDQELDINRLSDYDVDHIVPQSFIKDDSIDNKVLTRSDKNRGKSDNVPSEEVVKKMKNYWRQLLNAKLITQRKFDNLTKAERGGLSELDKAGFIKRQLVETRQITKHVAQILDSRMNTKYDENDKLIREVKVITLKSKLVSDFRKDFQFYKVREINNYHHAHDAYLNAVVGTALIKKYPKLESEFVYGDYKVYDVSEQEIGKATAKRFFYSNIMNFFKTEITLANGEIRKRPLIETNEETGEIVWDKGRDFATVRKVLSMPQVNIVKKTEVQTGALTNESIYARGSFDKLISRKHRFESSKYGGFGSPTVTYSVLVVAKSKVQDGKVKKIKTGKELIGITLLDKLVFEKNPLKFIEDKGYGNVQIDKCIKLPKYSLFEFENGTRRMLASRGDLQKANEMFLPAKLVTLLYHAHKIESSKELEHEAYILDHYNDLYQLLSYIERFASLYVDVEKNISKVKELFSNIESYSISEICSSVINLLTLTASGAPADFKFLGTTIPRKRYGSPQSILSSTLIHQSITGLYETRIDLSQLGGD

SEQ ID NO: 103 - protein, 1356 aa, Streptococcus dysgalactiae
MDKKYSIGLDIGTNSVGWAVITDDYKVPSKKFKVLGNTDRHSIKKNLIGALLFDSGETAEATRLKRTARRRYTRRKNRIRYLQEIFSSEMSKVDDSFFHRLEESFLVEEDKKHERHPIFGNIVDEVAYHEKYPTIYHLRKKLADSTDKADLRLIYLALAHMIKFRGHFLIEGDLNPDNSDMDKLFIQLVQTYNQLFEENINASRVDAKAILSARLSKSRRLENLIAQLPGEKRNGLFGNLIALSLGLTPNFKSNFDLAEDAKLQLSKDTYDDDLDNLLAQIGDQYADLFLAAKNLSDAILLSDILRVNSEITKAPLSASMIKRYDEHHQDLTLLKALVRQQLPEKYKEIFFDQSKNGYAGYIDGGASQEEFYKFIKPILEKMDGTEELLAKLNREDLLRKQRTFDNGSIPHQIHLGELHAILRRQEDFYPFLKDNREKIEKILTFRIPYYVGPLARGNSRFAWMTRKSEETITPWNFEEVVDKGASAQSFIERMTNFDKNLPNEKVLPKHSLLYEYFTVYNELTKVKYVTEGMRKPEFLSGKQKEAIVDLLFKTNRKVTVKQLKEDYFKKIECFDSVEISGVEDRFNASLGTYHDLLKIIKDKDFLDNEENEDILEDIVLTLTLFEDKEMIEERLKTYAHLFDDKVMKQLKRRHYTGWGRLSRKLINGIRDKQSGKTILDFLKDGFANRNFIQLIHDDSLTFKEAIQKAQVSGQGHSLHEQIANLAGSPAIKKGILQSVKVVDELVKVMGHKPENIVIEMARENQTTQKGQKNSRERMKRIEEGIKELGSQILKEHPVENTQLQNEKLYLYYLQNGRDMYVDQELDINRLSDYDVDHIVPQSFIKDDSIDNKVLTRSDKNRGKSDDVPSEEVVKKMKNYWRQLLNAKLITQRKFDNLTKAERGGLSELDKAGFIKRQLVETRQITKHVAQILDSRMNTKYDENDKLIREVKVITLKSKLVSDFRKDFQFYKVREINNYHHAHDAYLNAVVGTALIKKYPKLESEFVYGDYKVYDVSEQEIGKATAKRFFYSNIMNFFKTEITLANGEIRKRPLIETNEETGEIVWNKGRDFATVRKVLSMPQVNIVKKTEVQTGALTNESIYARGSFDKLISRKHRFESSKYGGFGSPTVTYSVLVVAKSKVQDGKVKKIKTGKELIGITLLDKLVFEKNPLKFIEDKGYGNVQIDKCIKLPKYSLFEFENGTRRMLASRGDLQKANEMFLPAKLVTLLYHAHKIESSKELEHEAYILDHYNDLYQLLSYIERFASLYVDVEKNISKVKELFSNIESYSISEICSSVINLLTLTASGAPADFKFLGTTIPRKRYGSPQSILSSTLIHQSITGLYETRIDLSQLGGD

SEQ ID NO: 104 - protein, 1356 aa, Streptococcus dysgalactiae
MDKKYSIGLDIGTNSVGWAVITDDYKVPSKKFKVLGNTDRHSIKKNLIGALLFDSGETAEATRLKRTARRRYTRRKNRIRYLQEIFSSEMSKVDDSFFHRLEESFLVEEDKKHERHPIFGNIVDEVAYHEKYPTIYHLRKKLADSTDKADLRLIYLALAHMIKFRGHFLIEGDLNPDNSDMDKLFIQLVQTYNQLFEENINASRVDAKAILSARLSKSRRLENLIAQLPGEKRNGLFGNLIALSLGLTPNFKSNFDLAEDAKLQLSKDTYDDDLDNLLAQIGDQYADLFLAAKNLSDAILLSDILRVNSEITKAPLSASMIKRYDEHHQDLTLLKALVRQQLPEKYKEIFFDQSKNGYAGYIDGGASQEEFYKFIKPILEKMDGTEELLAKLNREDLLRKQRTFDNGSIPHQIHLGELHAILRRQEDFYPFLKDNREKIEKILTFRIPYYVGPLARGNSRFAWMTRKSEETITPWNFEEVVDKGASAQSFIERMTNFDKNLPNEKVLPKHSLLYEYFTVYNELTKVKYVTEGMRKPEFLSGKQKEAIVDLLFKTNRKVTVKQLKEDYFKKIECFDSVEISGVEDRFNASLGTYHDLLKIIKDKDFLDNEENEDILEDIVLTLTLFEDKEMIEERLKKYANLFDDKVMKQLKRRHYTGWGRLSRKLINGIRDKQSGKTILDFLKDGFANRNFMQLINDDSLTFKEAIQKAQVSGQGHSLHEQIANLAGSPAIKKGILQSVKVVDELVKVMGHKPENIVIEMARENQTTQKGQKNSRERMKRIEEGIKELGSQILKEHPVENTQLQNEKLYLYYLQNGRDMYVDQELDINRLSDYDVDHIVPQSFIKDDSIDNKVLTRSDKNRGKSDNVPSEEVVKKMKNYWRQLLNAKLITQRKFDNLTKAERGGLSELDKAGFIKRQLVETRQITKHVAQILDSRMNTKYDENDKLIREVKVITLKSKLVSDFRKDFQFYKVREINNYHHAHDAYLNAVVGTALIKKYPKLESEFVYGDYKVYDVSEQEIGKATAKRFFYSNIMNFFKTEITLANGEIRKRPLIETNEETGEIVWDKGRDFATVRKVLSMPQVNIVKKTEVQTGALTNESIYARGSFDKLISRKHRFESSKYGGFGSPTVTYSVLVVAKSKVQDGKVKKIKTGKELIGITLLDKLVFEKNPLKFIEDKGYGNVQIDKCIKLPKYSLFEFENGTRRMLASRGDLQKANEMFLPAKLVTLLYHAHKIESSKELEHEAYILDHYNDLYQLLSYIERFASLYVDVEKNISKVKELFSNIESYSISEICSSVINLLTLTASGAPADFKFLGTTIPRKRYGSPQSILSSTLIHQSITGLYETRIDLSQLGGD

SEQ ID NO: 105 - protein, 1356 aa, Streptococcus dysgalactiae
MDKKYSIGLDIGTNSVGWAVITDDYKVPSKKFKVLGNTDRHSIKKNLIGALLFDSGETAEATRLKRTARRRYTRRKNRIRYLQEIFSSEMSKVDDSFFHRLEESFLVEEDKKHERHPIFGNIVDEVAYHEKYPTIYHLRKKLADSTDKADLRLIYLALAHMIKFRGHFLIEGDLNPDNSDMDKLFIQLVQTYNQLFEENINASRVDAKAILSARLSKSRRLENLIAQLPGEKRNGLFGNLIALSLGLTPNFKSNFDLAEDAKLQLSKDTYDDDLDNLLAQIGDQYADLFLAAKNLSDAILLSDILRVNSEITKAPLSASMIKRYDEHHQDLTLLKALVRQQLPEKYKEIFFDQSKNGYAGYIDGGASQEEFYKFIKPILEKMDGTEELLAKLNREDLLRKQRTFDNGSIPHQIHLGELHAILRRQEDFYPFLKDNREKIEKILTFRIPYYVGPLARGNSRFAWMTRKSEETITPWNFEEVVDKGASAQSFIERMTNFDKNLPNEKVLPKHSLLYEYFTVYNELTKVKYVTEGMRKPEFLSGKQKEAIVDLLFKTNRKVTVKQLKEDYFKKIECFDSVEISGVEDRFNASLGTYHDLLKIIKDKDFLDNEENEDILEDIVLTLTLFEDKEMIEERLKTYAHLFDDKVMKQLKRRHYTGWGRLSRKLINGIRDKQSGKTILDFLKDGFANRNFIQLIHDDSLTFKEAIQKAQVSGQGHSLHEQIANLAGSPAIKKGILQSVKVVDELVKVMGHKPENIVIEMARENQTTQKGQKNSRERMKRIEEGIKELGSQILKEHPVENTQLQNEKLYLYYLQNGRDMYVDQELDINRLSDYDVDHIVPQSFIKDDSIDNKVLTRSDKNRGKSDDVPSEEVVKKMKNYWRQLLNAKLITQRKFDNLTKAERGGLSELDKAGFIKRQLVETRQITKHVAQILDSRMNTKYDENDKLIREVKVITLKSKLVSDFRKDFQFYKVREINNYHHAHDAYLNAVVGTALIKKYPKLESEFVYGDYKVYDVSEQEIGKATAKRFFYSNIMNFFKTEITLANGEIRKRPLIETNEETGEIVWDKGRDFATVRKVLSMPQVNIVKKTEVQTGALTNESIYARGSFDKLISRKHRFESSKYGGFGSPTVTYSVLVVAKCKVQDGKVKKIKTGKELIGITLLDKLVFEKNPLKFIEDKGYGNVQIDKCIKLPKYSLFEFENGTRRMLASRGDLQKANEMFLPAKLVTLLYHAHKIESSKELEHEAYILDHYNDLYQLLSYIERFASLYVDVEKNISKVKELFSNIESYSISEICSSVINLLTLTASGAPADFKFLGTTIPRKRYGSPQSILSSTLIHQSITGLYETRIDLSQLGGD

SEQ ID NO: 106 - protein, 1356 aa, Streptococcus dysgalactiae
MDKKYSIGLDIGTNSVGWAVITDDYKVPSKKFKVLGNTDRHSIKKNLIGALLFDSGETAEATRLKRTARRRYTRRKNRIRYLQEIFSSEMSKVDDSFFHRLEESFLVEEDKKHERHPIFGNIVDEVAYHEKYPTIYHLRKKLADSTDKADLRLIYLALAHMIKFRGHFLIEGDLNPDNSDVDKLFIQLVQTYNQLFEENINASRVDAKAILSARLSKSRRLENLIAQLPGEKRNGLFGNLIALSLGLTPNFKSNFDLAEDAKLQLSKDTYDDDLDNLLAQIGDQYADLFLAAKNLSDAILLSDILRVNSEITKAPLSASMIKRYDEHHQDLTLLKALVRQQLPEKYKEIFFDQSKNGYAGYIDGGASQEEFYKFIKPILEKMDGTEELLAKLNREDLLRKQRTFDNGSIPHQIHLGELHAILRRQEDFYPFLKDNREKIEKILTFRIPYYVGPLARGNSRFAWMTRKSEETITPWNFEEVVDKGASAQSFIERMTNFDKNLPNEKVLPKHSLLYEYFTVYNELTKVKYVTEGMRKPAFLSGEQKKAIVDLLFKTNRKVTVKQLKEDYFKKIECFDSVEISGVEDRFNASLGTYHDLLKIIKDKDFLDNEENEDILEDIVLTLTLFEDKEMIEERLKTYAHLFDDKVMKQLKRRHYTGWGRLSRKLINGIRDKQSGKTILDFLKDGFANRNFIQLIHDDSLTFKEAIQKAQVSGQGHSLHEQIANLAGSPAIKKGILQSVKVVDELVKVMGHKPENIVIEMARENQTTQKGQKNSRERMKRIEEGIKELGSQILKEHPVENTQLQNEKLYLYYLQNGRDMYVDQELDINRLSDYDVDHIVPQSFIKDDSIDNKVLTRSDKNRGKSDNVPSEEVVKKMKNYWRQLLNAKLITQRKFDNLTKAERGGLSELDKAGFIKRQLVETRQITKHVAQILDSRMNTKYDENDKLIREVKVITLKSKLVSDFRKDFQFYKVREINNYHHAHDAYLNAVVGTALIKKYPKLESEFVYGDYKVYDVSEQEIGKATAKRFFYSNIMNFFKTEITLANGEIRKRPLIETNEETGEIVWDKGRDFATVRKVLSMPQVNIVKKTEVQTGALTNESIYARGSFDKLISRKHRFESSKYGGFGSPTVTYSVLVVAKSKVQDGKVKKIKTGKELIGITLLDKLVFEKNPLKFIEDKGYGNVQIDKCIKLPKYSLFEFENGTRRMLASRGDLQKANEMFLPAKLVTLLYHAHKIESSKELEHEAYILDHYNDLYQLLSYIERFASLYVDVEKNISKVKELFSNIESYSISEICSSVINLLTLTASGAPADFKFLGTTIPRKRYGSPQSILSSTLIHQSITGLYETRIDLSQLGGD

SEQ ID NO: 107 - protein, 1345 aa, Streptococcus equi
MKKPYTIALDIGTNSVGWVVVTDDYRVPTKKMKVLGNTERKTIKKNLIGALLFDSGDTAEGTRLKRTARRRYTRRKNRLRYLKEIFTEEMAKVDDGFFQRLEDSFYVLEDKEGNKHPIFANLADEVAYHKKYPTIYHLRKELVDNPQKADLRLIYLAVAHIIKFRGHFLIEGTLSSKNNNLQKSFDHLVDTYNLLFEEQLLTEGINAKELLSAALSKSKRLENLISLIPGQKKTGIFGNIIALSLGLTPNFKANFGLSKDVKLQLAKDTYADDLDSLLAQIGDQYADLFLAAKNLSDAILLSDILTESDEITRAPLSASMVKRYREHHKDLVTLKTLIKDQLPEKYQEIFLDKTKNGYAGYIEGQVSQEEFYKYLKPILARLDGSEPLLLKIDREDFLRKQRTFDNGSIPHQIHLEELHAILRRQEVFYPFLKDNRKKIESLLTFRIPYYVGPLARGHSRFAWVKRKFDGAIRPWNFEEIVDEEASAQIFIEKMTKNDLYLPNEKVLPKHSLLYETFTVYNELTKVKYATEGMTRPQFLSADQKQAIVDLLFKTNRKVTVKQLKENYFKKIECWDSVEITGVEDSFNASLGTYHDLLKIIQDKDFLDNPDNQKIIEDIILTLTLFEDKKMISKRLDQYAHLFDKVVLNKLERHHYTGWGRLSGKLINGIRDKQSGKTILDFLKDGFANRNFMQLIHDSELSFIDEIAKAQVIGKTEYSKDLVGNLAGSPAIKKGISQTIKIVDELVKIMGYLPQQIVIEMARENQTTAQGIKNARQRMRKLEETAKKLGSNILKEHPVDNSQLQNDKRYLYYLQNGKDMYTGDDLDIDYLSSYDIDHIIPQSFIKNNSIDNKVLTSQGANRGKLDNVPSEAIVRKMKGYWQSLLRAGAISKQKFDNLTKAERGGLTQVDKAGFIQRQLVETRQITKHVAQILDSRFNTEFDDHNKRIRKVHIITLKSKLVSDFRKEFGLYKIRDINHYHHAHDAYLNAVVAKAILGKYPQLAPEFVYGDYPKYNSFKERQKATQKMLFYSNILKFFKDQESLHVNSDGEEIWNANKHLPIIKNVLSIPQVNIVKKTEVQTGGFYKESILSKGNSDKLIPRKNNWDTRKYGGFDSPTVAYSVLVIAKMEKGKAKVLKPVKEMVGITIMERTAFEENPVVFLEARGYREIQEHLIIKLPKYSLFELENGRRRLLASSELQKGNELFLPVDYMTFLYLAAHYHELTGSSEDVLRKKYFVDRHLHYFDDIIQMINDFAERHILASSNLEKINHTYHNNSDLPVNERAENIINVFTFVALGAPAAFKFFDATIDRKRYTSTKEVLNATLIHQSVTGLYETRIDLSQLGEN

SEQ ID NO: 108 - protein, 1345 aa, Streptococcus equi
MKKPYTIALDIGTNSVGWVVVTDDYRVPTKKMKVLGNTERKTIKKNLIGALLFDSGDTAEGTRLKRTARRRYTRRKNRLRYLKEIFTEEMAKVDDGFFQRLEDSFYVLEDKEGNKHPIFANLADEVAYHKKYPTIYHLRKELVDNPQKADLRLIYLAVAHIIKFRGHFLIEGTLSSKNNNLQKSFDHLVDTYNLLFEEQLLTEGINAKELLSAALSKSKRLENLISLIPGQKKTGIFGNIIALSLGLTPNFKANFGLSKDVKLQLAKDTYADDLDSLLAQIGDQYADLFLAAKNLSDAILLSDILTESDEITRAPLSASMVKRYREHHKDLVTLKTLIKDQLPEKYQEIFLDKTKNGYAGYIEGQVSQEEFYKYLKPILARLDGSEPLLLKIDREDFLRKQRTFDNGSIPHQIHLEELHAILRRQEVFYPFLKDNRKKIESLLTFRIPYYVGPLARGHSRFAWVKRKFDGAIRPWNFEEIVDEEASAQIFIEKMTKNDLYLPNEKVLPKHSLLYETFTVYNELTKVKYATEGMTRPQFLSADQKQAIVDLLFKTNRKVTVKQLKENYFKKIECWDSVEITGVEDSFNASLGTYHDLLKIIQDKDFLDNPDNQKIIEDIILTLTLFEDKKMISKRLDQYAHLFDKVVLNKLERHHYTGWGRLSGKLINGIRDKQSGKTILDFLKDGFANRNFMQLIHDSELSFIDEIAKAQVIGKTEYSKDLVGNLASSPAIKKGISQTIKIVDELVKIMGYLPQQIVIEMARENQTTAQGIKNARQRMRKLEETAKKLGSNILKEHPVDNSQLQNDKRYLYYLQNGKDMYTGDDLDIDYLSSYDIDHIIPQSFIKNNSIDNKVLTSQGANRGKLDNVPSEAIVRKMKGYWQSLLRAGAISKQKFDNLTKAERGGLTQVDKAGFIQRQLVETRQITKHVAQILDSRFNTEFDDHNKRIRKVHIITLKSKLVSDFRKEFGLYKIRDINHYHHAHDAYLNAVVAKAILGKYPQLAPEFVYGDYPKYNSFKERQKATQKTLFYSNILKFFKDQESLHVNSDGEEIWNANKHLPIIKNVLSIPQVNIVKKTEVQTGGFYKESILSKGNSDKLIPRKNNWDTRKYGGFDSPTVAYSVLVIAKMEKGKAKVLKPVKEMVGITIMERIAFEENPVVFLEAKGYREIQEHLIIKLPKYSLFELENGRRRLLASSELQKGNELFLPVDYMTFLYLAAHYHELTGSSEDVLRKKYFVERHLHYFDDIIQMINDFAERHILASSNLEKINHTYHNNSDLPINERAENIINVFTFVALGAPAAFKFFDATIDRKRYTSTKEVLNATLIHQSVTGLYETRIDLSQLGEN

SEQ ID NO: 109 - protein, 1345 aa, Streptococcus equi
MKKPYTIALDIGTNSVGWVVVTDDYRVPTKKMKVLGNTERKTIKKNLIGALLFDSGDTAEGTRLKRTARPRYTRRKNRLRFLKEIFTEEMAKVDDGFFQRLEDSFYVLEDKEGNKHPIFANLADEVAYHKKYPTIYHLRKELVDNPQKADLRLIYLAVAHIIKFRGHFLIEGTLSSKNNNLQKSFDHLVDTYNLLFEEQLLTEGINAKELLSAALSKSKRLENLISLIPGQKKTGIFGNIIALSLGLTPNFKANFGLSKDVKLQLAKDTYADDLDSLLAQIGDQYADLFLAAKNLSDAILLSDILTESDEITRAPLSASMVKRYREHHKDLVTLKTLIKDQLPEKYQEIFLDKTKNGYAGYIEGQVSQEEFYKYLKPILARLDGSEPLLLKIDREDFLRKQRTFDNGSIPHQIHLEELHAILRRQEVFYPFLKDNRKKIESLLTFRIPYYVGPLARGHSRFAWVKRKFDGAIRPWNFEEIVDEEASAQIFIEKMTKNDLYLPNEKVLPKHSLLYETFTVYNELTKVKYATEGMTRPQFLSADQKQAIVDLLFKTNRKVTVKQLKENYFKKIECWDSVEITGVEDSFNASLGTYHDLLKIIQDKDFLDNPDNQKIIEDIILTLTLFEDKKMISKRLDQYAHLFDKVVLNKLERHHYTGWGRLSGKLINGIRDKQSGKTILDFLKDGFANRNFMQLIHDSELSFIDEIAKAQVIGKTEYSKDLVGNLAGSPAIKKGISQTIKIVDELVKIMGYLPQQIVIEMARENQTTAQGIKNARQRMRKLEETAKKLGSNILKEHPVDNSQLQNDKRYLYYLQNGKDMYTGDDLDIDYLSSYDIDHIIPQSFIKNNSIDNKVLTSQGANRGKLDNVPSEAIVRKMKGYWQSLLRAGAISKQKFDNLTKAERGGLTQVDKAGFIQLQLVETRQITKHVAQILDSRFNTEFDDHNKRIRKVHIITLKSKLVSDFRKEFGLYKIRDINHYHHAHDAYLNAVVAKAILGKYPQLAPEFVYGDYPKYNSFKERQKATQKTLFYSNILKFFKDQESLHVNSDGEEIWNANKHLPIIKNVLSIPQVNIVKKTEVQTGGFYKESILSKGNSDKLIPRKNNWDTRKYGGFDSPTVAYSVLVIAKMEKGKAKVLKPVKEMVGITIMERIAFEENPVVFLEAKGYREIQEHLIIKLPKYSLFELENGRRRLLASSELQKGNELFLPVDYMTFLYLAAHYHELTGSSEDVLRKKYFVERHLHYFDDIIQMINDFAERHILASSNLEKINHTYHNNSDLPVNERAENIINVFTFVALGAPAAFKFFDATIDRKRYTSTKEVLNATLIHQSVTGLYETRIDLSQLGEN

SEQ ID NO: 110 - protein, 1360 aa, Streptococcus equinus
MEKTYSIGLDIGTNSVGWAVITDDYKVPAKKMKVLGNTDKKYIKKNLLGALLFDSGETAEATRLKRAARRRYTRRKNRLRYLQEIFAKEMAKVDESFFQRLEESFLTDDDKTFDSHPIFGNKAEEDTYHQEFPTIYHLRKHLADSPEKVDLRLVYLALAHMIKFRGHFLIEGQLNAENTDVQKIFADFVGVYDRTFDDSHLSEITVDAASILTEKISKSRRLENLIKQYPTEKKNTLFGNLVALALGLQPNFKTNFKLSEDAKLQFSKDTYDEDLEELLGKIGDDYADLFTAAKNLYDAILLSGILTVDDNSTKAPLSASMIKRYEEHHEDLEKLKTFIKVNNFDKYHEIFKDKSKNGYAGYIENGVKQDIFYKHLKSIISEKNGGQYFLDKIEREDFLRKQRTFDNGSIPYQIHLQEMRTILRRQGEYYPFLKENQAKIEKILTFRIPYYVGPLARKNSRFAWAKYHSDEPITPWNFDEVVDKEKSAEKFITRMTLNDLYLPEEKVLPKHSYVYETFAVYNELTKIKYVNEQGKSFFFDANMKQEIFDHVFKENRKVTKAKLLSYLNNEFEEFRINDLIGLDKDSKSFNASLGTYHDLKKILDKSFLDDKTNEQIIEDIVLTLTLFEDRDMIHERLQKYSDIFTSQQLKKLERRHYTGWGRLSYKLINGIRNKENNKTILDFLIDDGDANRNFMQLINDDSLSFKTTIQEAQVVGDVDDIEAVVHDLPGSPAIKKGILQSVKIVDELVKVMGHNPQNIVIEMARENQITGYGRNRSNQRLKRLQDSLKPSYVDSKVENSHLQNDRLFLYYIQNGKDMYTGEELDIDHLSDYDIDHIIPQAFIKDNSIDNRVLTSSAKNRGKSDDVPSIEIVRNRKSYWYKLYKSGLISKRKFDNLTKAERGGLTETDKAGFIKRQLVETRQITKHVAQILDARFNTKCDENDKVIRDVKVITLKSSLVSQFRKEFKFYKVREINDYHHAHDAYLNAVVGTALLKKYPKLAPEFVYGEYKKYDVSSDNHSELGKATAKYFFYSNLMNFFKTEVKYADGRVFERPDIETNADGEVVWNKQRDFNIVRKVLSYPQVNIVKKVEVQTGGFSKESILPKGDSDKLIPRKTKKLQWETQKYGGFDSPTVAYSVLVVADVEKGKTRKLKTVKELVGISIMERSSFEENPVSFLEKKGYHNVQEDKLIKLPKYSLFEFEGGRRRLLASATELQKGNEVVLPQYMVNLLYHSQHVNNSHKPEHLNYVKQHKDEFKDIFNLIISIARINILKPKVVDNLINEFTEYGQEDISSLSESFINLLKFISFGAPGAFKFLKLDVKQSNLRYKSTTEALSATLIHQSVTGLYETRIDLSKLGEE

SEQ ID NO: 111 - protein, 1353 aa, Streptococcus gallolyticus
MTKKNYSIGLDIGTNSVGWAVITDDYKVPAKKMKVLGNTDKKYIKKNLLGALLFDSGETAEATRLKRTARRRYTRRKNRLRYLQEIFAEEMTKVDESFFYRLDESFLTTDEKDFERHPIFGNKAEEDAYHQKFPTIYHLRNYLADSSEKADLRLVYLALAHMIKYRGHFLIEGKLNAENTDVQKLFTDFVGVYDRTFDDSHLSEITVDVASTLTEKISKSRRLENLIKYYPTEKKNTLFGNLIALALGLQPNFKMNFKLSEDAKLQFSKDTYEEDLEELLGKIGDDYADLFTSAKNLYDAILLSGILTVDDNSTKAPLSASMIKRYVEHHEDLEKLKEFIKANKSELYHDIFKDKNKNGYAGYIENGVKQDEFYKYLKNTLSKIDGSDYFLDKIEREDFLRKQRTFDNGSIPHQIHLQEMHAILRRQGDYYPFLKEKQDRIEKILTFRIPYYVGPLVRKDSRFAWAEYRSDEKITPWNFDKVIDKEKSAEKFITRMTLNDLYLPEEKVLPKHSHVYETYAVYNELTKIKYVNEQGKESFFDSNMKQEIFDHVFKENRKVTKEKLLNYLNKEFPEYRIKDLIGLDKENKSFNASLGTYHDLKKILDKAFLDDKVNEEVIEDIIKTLTLFEDKDMIHERLQKYSDIFTANQLKKLERRHYTGWGRLSYKLINGIRNKENNKTILDYLIDDGSANRNFMQLINDDTLPFKQIIQKSQVVGDVDDIEAVVHDLPGSPAIKKGILQSVKIVDELVKVMGDNPDNIVIEMARENQTTNRGRSQSQQRLKKLQSSLKPSYIEDKVENSHLQNDQLFLYYIQNGKDMYTGDELDIDHLSDYDIDHIIPQAFIKDDSIDNRVLTSSAKNRGKSDDVPSLDIVRARKAEWVRLYKSGLISKRKFDNLTKAERGGLTEADKAGFIKRQLVETRQITKHVAQILDARFNTEHDENDKVIRDVKVITLKSNLVSQFRKDFEFYKVREINDYHHAHDAYLNAVVGTALLKKYPKLASEFVYGEYKKYDISSDKATAKYFFYSNLMNFFKTKVKYADGTVFERPIIETNADGEIAWNKQIDFEKVRKVLSYPQVNIVKKVETQTGGFSKESILPKGDSDKLIPRKTKKVYWDTKKYGGFDSPTVAYSVFVVADVEKGKAKKLKTVKELVGISIMERSFFEENPVEFLENKGYHNIREDKLIKLPKYSLFEFEGGRRRLLASASELQKGNEMVLPGYLVELLYHAHRADNFNSTEYLNYVSEHKKEFEKVLSCVEDFANLYVDVEKNLSKIRAVADSMDNFSIEEISNSFINLLTLTALGAPADFNFLGEKIPRKRYTSTKECLTATLIHQSITGLYETRIDLSKLGEE

SEQ ID NO: 112 - protein, 1354 aa, Streptococcus gallolyticus
MTEKNYSIGLDIGTNSVGWAVITDDYKVPAKKMKVLGNTDKKYIKKNLLGALLFDNGETAEATRLKRTARRRYTRRKNRLRYLQEIFAEEMAKVDESFFYRLDESFLTTDDKDFERHPIFGNKADEIKYHQEFPTIYHLRKHLADSHEKADLRLIYLALAHMIKFRGHFLIEGELNAENTDVQKLFEAFVEVYDRTFDDSNLSEITVDASSILTEKFSKSRRLENLIKHYPTEKKNTLFGNLVALALGLQPNFKTSFKLSEDAKLQFSKDTYEEDLEELIGKIGDEYADLFTSAKNLYDAILLSGILTVADNTTKAPLSASMIKRYNEHQVDLKKLKEFIKNNASDKYDEIFNDKDKNGYAGYIENGVKQDEFYKYLKTTLSKIDGSDYFLDKIEREDFLRKQRTFDNGSIPHQIHLQEMHAILRRQGEHYAFLKENQAKIEKILTFRIPYYVGPLARKNSRFAWAEYHSDEKITPWNFDEIIDKEKSAEKFITRMTLNDLYLPEEKVLPKHSLVYETYTVYNELTKVKYVNEQGKSNFFDANMKQEIFEHVFKENRKVTKDKFLNYLNKEFPEYRIQDLIGLDKENKSFNASLGTYHDLKKILDKSFLDDKTNETIIEDIIQTLTLFEDRDMIRQRLQKYSDIFTPQQLKKLERRHYTGWGRLSYKLINGIRNKENGKSILDYLIDDGYANRNFMQLISDDTLPFKQIIKDAQIIGDIDDVTSVVRELPGSPAIKKGILQSVKIVDELVKVMGHNPDNIVIEMARENQTTNRGRNQSQQRLKKLQDSLKPSYIEGKVENNHLQDDRLFLYYIQNGKDMYTGDELDIDHLSDYDIDHIIPQAFIKDDSIDNRVLTSSAKNRGKSDDVPSLDIVHDRKADWIRLYKSGLISKRKFDNLTKAERGGLTENDKAGFIKRQLVETRQITKHVAQILDSRFNTERDENDKVIRNVKVITLKSNLVSQFRKDFKFYKVREINDYHHAHDAYLNAVVGTALLKKYPKLAPEFVYGEYKKYDISGDKATAKYFFYSNLMNFFKRVIRYSNGKVVVRPVIECSKDTGEIAWNKQTDFEKVRRVLSYPQVNIVKKVETQTGGFSKESILPKGNSDKLIPRKTKKFRWDTPKYGGFDSPNIAYSVFVIADVEKGKAKKLKTVKELVGISIMERSSFEENPVVFLEKKGYQNVQEDNLIKLPKYSLFEFEGGRRRLLASASELQKGNEVVLSRHLVELLYHAHRVNSFNNSEHLKYVSEHKKEFGEVLSCVENFAKSYVDVEKNLGKIRAVADKIDTFSIEDISISFVNLLTLTALGAPADFNFLGEKIPRKRYTSTKECLNATLIHQSITGLYETRIDLSKLGEE

SEQ ID NO: 113 - protein, 1355 aa, Streptococcus gallolyticus; identical to SEQ ID NO: 12

SEQ ID NO: 114 - protein, 1358 aa, Streptococcus infantarius
MEKSYSIGLDIGTNSVGWAVITDDYKVPAKKMKVLGNTDKKYIKKNLLGALLFDSGETAEVTRLKRTARRRYTRRKNRLRYLQEIFAKEMTKVDESFFQRLEESFLTDDDKTFDSHPIFGNKAEEDAYHQKFPTIYHLRKYLADSQEKADLRLVYLALAHMIKYRGHFLIEGELNAENTDVQKLFNVFVETYDKIVDESHLSEIEVDASSILTEKVSKSRRLENLIKQYPTEKKNTLFGNLIALALGLQPNFKTNFKLSEDAKLQFSKDTYEEDLEELLGKVGDDYADLFISAKNLYDAILLSGILTVDDNSTKAPLSASMIKRYVEHHEDLEKLKEFIKINKLKLYHDIFKDKTKNGYAGYIDNGVKQDEFYKYLKTILTKIDDSDYFLDKIERDDFLRKQRTFDNGSIPHQIHLQEMHSILRRQGDYYPFLKENQAKIEKILTFRIPYYVGPLARKDSRFAWANYHSDEPITPWNFDEVVDKEKSAEKFITRMTLNDLYLPEEKVLPKHSHVYETFTVYNELTKIKYVNEQGESFFFDANMKQEIFDHVFKENRKVTKAKLLSYLNNEFEEFRINDLIGLDKDSKSFNASLGTYHDLKKILDKSFLDDKTNGQIIEDIVLTLTLFEDRDMIHERLQKYSDFFTSQQLKKLERRHYTGWGRLSYKLINGIRNKENNKTILDFLIDDGHANRNFMQLINDESLSFKTIIQEAQVVGDVDDIEAVVHDLPGSPAIKKGILQSVKIVDELVKVMGDNPDNIVIEMARENQTTGYGRNKSNQRLKRLQDSLKPSYVDSKVENSHLQNDRLFLYYIQNGKDMYTGEELDIDRLSDYDIDHIIPQAFIKDNSIDNKVLTSSAKNRGKSDDVPSIEIVRNRRSYWYKLYKSGLISKRKFDNLTKAERGGLTEADKAGFIKRQLVETRQITKHVAQILDARFNTKRDENDKVIRDVKVITLKSNLVSQFRKEFKFYKVREINDYHHAHDAYLNAVVGTALLKKYPKLTPEFVYGEYKKYDVSSDDYSEMGKATAKYFFYSNLMNFFKTEVKYADGRVFERPDIETNADGEVVWNKQKDFDIVRKVLSYPQVNIVKKVEAQTGGFSKESILSKGDSDKLIPRKTKKVYWNTKKYGGFDSPTVAYSVLVVADIEKGKAKKLKTVKELVGISIMERSFFEENPVSFLEKKGYHNVQEDKLIKLPKYSLFEFEGGRRRLLASATELQKGNEVMLPAHLVELLYHAHRIDSFNSTEHLKYVSEHKKEFEKVLSCVENFSNLYVDVEKNLSKVRAAAESMTNFSLEEISASFINLLTLTALGAPADFNFLGEKIPRKRYTSTKECLSATLIHQSVTGLYETRIDLSKLGEE

SEQ ID NO: 115 - protein, 1358 aa, Streptococcus iniae
MRKPYSIGLDIGTNSVGWAVITDDYKVPSKKMRIQGTTDRTSIKKNLIGALLFDNGETAEATRLKRTTRRRYTRRKYRIKELQKIFSSEMNELDIAFFPRLSESFLVSDDKEFENHPIFGNLKDEITYHNDYPTIYHLRQTLADSDQKADLRLIYLALAHIIKFRGHFLIEGNLDSENTDVHVLFLNLVNIYNNLFEEDVETASIDAEKILTSKTSKSRRLENLIAEIPNQKRNMLFGNLVSLALGLTPNFKTNFELLEDAKLQISKDSYEEDLDNLLAQIGDQYADLFIAAKKLSDAILLSDIITVKGASTKAPLSASMVQRYEEHQQDLALLKNLVKKQIPEKYKEIFDNKEKNGYAGYIDGKTSQEEFYKYIKPILLKLDGTEKLISKLEREDFLRKQRTFDNGSIPHQIHLNELKAIIRRQEKFYPFLKENQKKIEKLFTFKIPYYVGPLANGQSSFAWLKRQSNESITPWNFEEVVDQEASARAFIERMTNFDTYLPEEKVLPKHSPLYEMFMVYNELTKVKYQTEGMKRPVFLSSEDKEEIVNLLFKKERKVTVKQLKEEYFSKMKCFHTVTILGVEDRFNASLGTYHDLLKIFKDKAFLDDEANQDILEEIVWTLTLFEDQAMIERRLVKYADVFEKSVLKKLKKRHYTGWGRLSQKLINGIKDKQTGKTILGFLKDGVANRNFMQLINDSSLDFAKIIKNEQEKTIKNESLEETIANLAGSPAIKKGILQSIKIVDEIVKIMGQNPDNIVIEMARENQSTMQGIKNSRQRLRKLEEVHKNTGSKILKEYNVSNTQLQSDRLYLYLLQDGKDMYTGKELDYDNLSQYDIDHIIPQSFIKDNSIDNTVLTTQASNRGKSDNVPNIETVNKMKSFWYKQLKSGAISQRKFDHLTKAERGALSDFDKAGFIKRQLVETRQITKHVAQILDSRFNSNLTEDSKSNRNVKIITLKSKMVSDFRKDFGFYKLREVNDYHHAQDAYLNAVVGTALLKKYPKLEAEFVYGDYKHYDLPDSSLGKATTRMFFYSNLMNFFKKEIKLADDTIFTRPQIEVNTETGEIVWDKVKDMQTIRKVMSYPQVNIVMKTEVQTGGFSKESIWPKGDSDKLIARKKSWDPKKYGGFDSPIIAYSVLVVAKIAKGKTQKLKTIKELVGIKIMEQDEFEKDPIAFLEKKGYQDIQTSSIIKLPKYSLFELENGRKRLLASELQKGNELALPNKYVKFLYLASHYTKFTGKEEDREKKRSYVESHLYYFDEIMQIIVEYSNRYILADSNLIKIQNLYKEKDNFSIEEQAINMLNLFTFTDLGAPSAFKFFNGDIDRKRYSSTNEIINSTLIYQSPTGLYETRIDLSKLGGK

SEQ ID NO: 116 - protein, 1263 aa, Streptococcus iniae
  misc_feature (1257)..(1257): Xaa can be any naturally occurring amino acid
MRKPYSIGLDIGTNSVGWAVITDDYKVPSKKMRIQGTTDRTSIKKNLIGALLFDNGETAEATRLKRTTRRRYTRRKYRIKELQKIFSSEMNELDIAFFPRLSESFLVSDDKEFENHPIFGNLKDEITYHNDYPTIYHLRQTLADSDQKADLRLIYLALAHIIKFRGHFLIEGNLDSENTDVHVLFLNLVNIYNNLFEEDVETASIDAEKILTSKTSKSRRLENLIAEIPNQKRNMLFGNLVSLALGLTPNFKTNFELLEDAKLQISKDSYEEDLDNLLAQIGDQYADLFIAAKKLSDAILLSDIITVKGASTKAPLSASMVQRYEEHQQDLALLKNLVKKQIPEKYKEIFDNKEKNGYAGYIDGKTSQEEFYKYIKPILLKLDGTEKLISKLEREDFLRKQRTFDNGSIPHQIHLNELKAIIRRQEKFYPFLKENQKKIEKLFTFKIPYYVGPLANGQSSFAWLKRQSNESITPWNFEEVVDQEASARAFIERMTNFDTYLPEEKVLPKHSPLYEMFMVYNELTKVKYQTEGMKRPVFLSSEDKEEIVNLLFKKERKVTVKQLKEEYFSKMKCFHTVTILGVEDRFNASLGTYHDLLKIFKDKAFLDDEANQDILEEIVWTLTLFEDQAMIERRLVKYADVFEKSVLKKLKKRHYTGWGRLSQKLINGIKDKQTGKTILGFLKDGVANRNFMQLINDSSLDFAKIIKNEQEKTIKNESLEETIANLAGSPAIKKGILQSIKIVDEIVKIMGQNPDNIVIEMARENQSTMQGIKNSRQRLRKLEEVHKNTGSKILKEYNVSNTQLQSDRLYLYLLQDGKDMYTGKELDYDNLSQYDIDHIIPQSFIKDNSIDNTVLTTQASNRGKSDNVPNIETVNKMKSFWYKQLKSGAISQRKFDHLTKAERGALSDFDKAGFIKRQLVETRQITKHVAQILDSRFNSNLTEDSKSNRNVKIITLKSKMVSDFRKDFGFYKLREVNDYHHAQDAYLNAVVGTALLKKYPKLEAEFVYGDYKHYDLPDSSLGKATTRMFFYSNLMNFFKKEIKLADDTIFTRPQIEVNTETGEIVWDKVKDMQTIRKVMSYPQVNIVMKTEVQTGGFSKESIWPKGDSDKLIARKKSWDPKKYGGFDSPIIAYSVLVVAKIAKGKTQKLKTIKELVGIKIMEQDEFEKDPIAFLEKKGYQDIQTSSIIKLPKYSLFELENGRKRLLASELQKGNELALPNKYVKFLYLASHYTKFTGKEEDREKKRSYVESHLYYFXEVKSSF

SEQ ID NO: 117 - protein, 1257 aa, Streptococcus iniae
  misc_feature (1255)..(1255): Xaa can be any naturally occurring amino acid
  misc_feature (1257)..(1257): Xaa can be any naturally occurring amino acid
MRKPYSIGLDIGTNSVGWAVITDDYKVPSKKMRIQGTTDRTSIKKNLIGALLFDNGETAEATRLKRTTRRRYTRRKYRIKELQKIFSSEMNELDIAFFPRLSESFLVSDDKEFENHPIFGNLKDEITYHNDYPTIYHLRQTLADSDQKADLRLIYLALAHIIKFRGHFLIEGNLDSENTDVHVLFLNLVNIYNNLFEEDVETASIDAEKILTSKTSKSRRLENLIAEIPNQKRNMLFGNLVSLALGLTPNFKTNFELLEDAKLQISKDSYEEDLDNLLAQIGDQYADLFIAAKKLSDAILLSDIITVKGASTKAPLSASMVQRYEEHQQDLALLKNLVKKQIPEKYKEIFDNKEKNGYAGYIDGKTSQEEFYKYIKPILLKLDGTEKLISKLEREDFLRKQRTFDNGSIPHQIHLNELKAIIRRQEKFYPFLKENQKKIEKLFTFKIPYYVGPLANGQSSFAWLKRQSNESITPWNFEEVVDQEASARAFIERMTNFDTYLPEEKVLPKHSPLYEMFMVYNELTKVKYQTEGMKRPVFLSSEDKEEIVNLLFKKERKVTVKQLKEEYFSKMKCFHTVTILGVEDRFNASLGTYHDLLKIFKDKAFLDDEANQDILEEIVWTLTLFEDQAMIERRLVKYADVFEKSVLKKLKKRHYTGWGRLSQKLINGIKDKQTGKTILGFLKDGVANRNFMQLINDSSLDFAKIIKNEQEKTIKNESLEETIANLAGSPAIKKGILQSIKIVDEIVKIMGQNPDNIVIEMARENQSTMQGIKNSRQRLRKLEEVHKNTGSKILKEYNVSNTQLQSDRLYLYLLQDGKDMYTGKELDYDNLSQYDIDHIIPQSFIKDNSIDNTVLTTQASNRGKSDNVPNIETVNKMKSFWYKQLKSGAISQRKFDHLTKAERGALSDFDKAGFIKRQLVETRQITKHVAQILDSRFNSNLTEDSKSNRNVKIITLKSKMVSDFRKDFGFYKLREVNDYHHAQDAYLNAVVGTALLKKYPKLEAEFVYGDYKHYDLPDSSLGKATTRMFFYSNLMNFFKKEIKLADDTIFTRPQIEVNTETGEIVWDKVKDMQTIRKVMSYPQVNIVMKTEVQTGGFSKESIWPKGDSDKLIARKKSWDPKKYGGFDSPIIAYSVLVVAKIAKGKTQKLKTIKELVGIKIMEQDEFEKDPIAFLEKKGYQDIQTSSIIKLPKYSLFELENGRKRLLASELQKGNELALPNKYVKFLYLASHYTKFTGKEEDREKKRSYVESHLYXFX

SEQ ID NO: 118 - protein, 199 aa, Streptococcus iniae IUSA1
MEQDEFEKDPIAFLEKKGYQDIQTSSIIKLPKYSLFELENGRKRLLASKELQKGNELALPNKYVKFLYLASHYTKFTGKEEDREKKRSYVESHLYYFDEIMQIIVEYSNRYILADSNLIKIQNLYKEKDNFSIEEQAINMLNLFTFTDLGAPSAFKFFNGDIDRKRYSSTNEIINSTLIYQSPTGLYETRIDLSKLGGK

SEQ ID NO: 119 - protein, 1271 aa, Streptococcus iniae SF1
MRKPYSIGLDIGTNSVGWAVITDDYKVPSKKMRIQGTTDRTSIKKNLIGALLFDNGETAEATRLKRTTRRRYTRRKYRIKELQKIFSSEMNELDIAFFPRLSESFLVSDDKEFENHPIFGNLKDEITYHNDYPTIYHLRQTLADSDQKADLRLIYLALAHIIKFRGHFLIEGNLDSENTDVHVLFLNLVNIYNNLFEEDVETASIDAEKILTSKTSKSRRLENLIAEIPNQKRNMLFGNLVSLALGLTPNFKTNFELLEDAKLQISKDSYEEDLDNLLAQIGDQYADLFIAAKKLSDAILLSDIITVKGASTKAPLSASMVQRYEEHQQDLALLKNLVKKQIPEKYKEIFDNKEKNGYAGYIDGKTSQEEFYKYIKPILLKLDGTEKLISKLEREDFLRKQRTFDNGSIPHQIHLNELKAIIRRQEKFYPFLKENQKKIEKLFTFKIPYYVGPLANGQSSFAWLKRQSNESITPWNFEEVVDQEASARAFIERMTNFDTYLPEEKVLPKHSPLYEMFMVYNELTKVKYQTEGMKRPVFLSSEDKEEIVNLLFKKERKVTVKQLKEEYFSKMKCFHTVTILGVEDRFNASLGTYHDLLKIFKDKAFLDDEANQDILEEIVWTLTLFEDQAMIERRLVKYADVFEKSVLKKLKKRHYTGWGRLSQKLINGIKDKQTGKTILGFLKDGVANRNFMQLINDSSLDFAKIIKNEQEKTIKNESLEETIANLAGSPAIKKGILQSIKIVDEIVKIMGQNPDNIVIEMARENQSTMQGIKNSRQRLRKLEEVHKNTGSKILKEYNVSNTQLQSDRLYLYLLQDGKDMYTGKELDYDNLSQYDIDHIIPQSFIKDNSIDNTVLTTQASNRGKSDNVPNIETVNKMKSFWYKQLKSGAISQRKFDHLTKAERGALSDFDKAGFIKRQLVETRQITKHVAQILDSRFNSNLTEDSKSNRNVKIITLKSKMVSDFRKDFGFYKLREVNDYHHAQDAYLNAVVGTALLKKYPKLEAEFVYGDYKHYDLPDSSLGKATTRMFFYSNLMNFFKKEIKLADDTIFTRPQIEVNTETGEIVWDKVKDMQTIRKVMSYPQVNIVMKTEVQTGGFSKESIWPKGDSDKLIARKKSWDPKKYGGFDSPIIAYSVLVVAKIAKGKTQKLKTIKELVGIKIMEQDEFEKDPIAFLEKKGYQDIQTSSIIKLPKYSLFELENGRKRLLASELQKGNELALPNKYVKFLYLASHYTKFTGKEEDREKKRSYVESHLYYFDVRLSQVFRVTNVEF

SEQ ID NO: 120 - protein, 1345 aa, Streptococcus intermedius
MKKPYSIGLDIGTNSVGWAVVTDDYKVPAKKMKVLGNTDKSHIKKNLLGALLFDSGNTAEDRRLKRTARRRYTRRRNRILYLQEIFSEEMGKVDDSFFHRLEDSFLVTEDKRGERHPIFGNLEEEVKYHENFPTIYHLRQYLADNPEKTDLRLVYLALAHIIKFRGHFLIEGKFDTRNNDVQRLFQEFLAVYDNTFENSSLQEQNVQVEEILTDKISKSAKKDRVLKLFPNEKSNGRFAEFLKLIVGNQADFKKHFELEEKAPLQFSKDTYEEELEVLLAQIEDNYAELFLSAKKLYDSILLSGILTVTDVSTKAPLSASMIQRYNEHQMDLAQLKQFIRQKLSDKYNEVFSDVSKDGYAGYIDGKTNQEAFYKYLKGLLNKIEGSGYFLDKIEREDFLRKQRTFDNGSIPHQIHLQEMRAIIRRQAEFYPFLADNQDRIEKILTFRIPYYIGPLARGKSDFSWLSRKSADKITPWNFDEIVDKESSAEAFINRMTNYDLYLPNQKVLPRHSLLYEKFTVYNELTKVKYKTEQGKTAFFDANMKQEIFDGVFKVYRKVTKDKLMDFLEKEFDEFRIVDLTGLDKENKAFNASYGTYHDLRKILDKDFLDNSKNEKILEDIVLTLTLFEDREMIRKRLENYSDLLTKEQVKNLERRHYTGWGRLSAELIHGIRNKESRKTILDYLIDDGNSNRNFMQLINDDALSFKEEIAKAQVIGETDNLNQVVSDIAGSPAIKKGILQSLKIVDELVKIMGHQPENIVVEMARENQFTNQGRRNSQQRLKGLTDSIKEFGSQILKEHPVENSQLQNDRLFLYYLQNGRDMYTGEELDIDYLSQYDIDHIIPQAFIKDNSIDNRVLTSSKENRGKSDDVPSKDVVRKMKSYWSKLLSAKLITQRKFDNLTKAERGGLTDDDKAGFIKRQLVETRQITKHVARILDERFNTETDENNKKIRQVKIVTLKSNLVSNFRKEFELYKVREINDYHHAHDAYLNAVIGKALLGVYPQLEPEFVYGDYPHFHGHKENKATAKKFFYSNIMNFFKKDDVRTDKNGEIIWKKDEHISNIKKVLSYPQVNIVKKVEEQTGGFSKESILPKGNSDKLIPRKTKKFYWDTKKYGGFDSPIVAYSILVIANIEKGKSKKLKLVKDLVGITIMERTIFEKNPVAFLERKGYRNVQEENIVKLPKYSLFELENGRRRLLASARELQKGNEIVLPNHLGTMLYHAKNIHKVDEPKHLDYVKKHKDEFKELLDVVSNFSKKNILAESNLEKIEELYAQNNNKDITELASSFINLLTFTAIGAPAAFKFFDNNIDRKRYTSTTEILNATLIHQSITGLYETRIDLSRLGGD

SEQ ID NO: 121 - protein, 1333 aa, Streptococcus massiliensis
MKKPYSIGLDIGTNSVGWAVVMEDYKVPSKKMKVLGNTDKQSIKKNLIGALLFDSGETAVERRLNRTTSRRYDRRRNRIRYLQHIFAEEMNRADENFFHRLKESFFVEEDKTYSKYPIFGTLEEEKNYHKNYPTIYHLRKTLADTPDKMDIRLIYLALAHIIKYRGHFLIEGDLDIENIGIQDSFKSFIEEYNTQFGTKLDSTTKVEAIFTENSSKAKRVETILGLFPDETAAGNLDKFLKLMLGNQADFKKVFDLEEKITLQFSKDSYEEDLELLLSKIDEEYAALFDLAKKVYDAVLLSNILTVKEKNTKAPLSASMIKRYEEHKDDLKAFKRFFRERLPEKYETMFKDLTKPSYAAYVSGAVTEDDFYKFSKGLLIDVEGAEYFLEKIEREDFLRKQRTFDNGAIPNQVHVKELQAIILNQSKYYPFLAENKEKIEKILTFRIPYYVGPLARGNSSFAWLQRKSDEAIRPWNFEQVVDMETSASRFIERMTLHDLYLPDEKVLPRHSLIYEKYTVFNELTKVRFTPEGGKEVYFSKTDKENIFDSLFKRYRKVTKRKLKDFIEKELGYGYIDIDNIKGVEEQFNASYTTYQDLLKIIGDKEFLDNEENKDLLEEIIYILTVFEDRKMIEKRLSELNIPFENKIIKKLARKKYTGWGNLSRKLIDGIRNRETNRTILGHLIDDGFSNRNLMQLINDDGLDFKEIIRKAQTIENIDTNQALVSSLPGSPAIKKGILQSLNIVDEIIAIMGYAPTNIVIEMARENQTTQKGRDNSAQRLKKIEDGIKLGSDLLKQNPIQDNKDLQKEKLFLYYMQNGIDLYTGQPLNCDPDSLAFYDVDHIVPRSYIKNDSFDNKVLTTSKGNRKKLDDVPAKEVVEKMENTWRRLHAAGLISDIKLSYLMKGELTEEDKAGFIRRQLVETRQITKHVARLLDEKLNRKKNENGEKLRTTKIITLKSVFASRFRANFDLYKLRELNHYHHAHDAYLNAVVAQALLKVYPKFERELVYGSYVKESIFSRKATERMRMYNNILKFISKDKKDQETGEIVWDKKEIENIVKKVIYSSPVNIVKKREEQSGALFKQSNMAVGYNNKLIPRKKDWSVDKYGGFIEPAESYSLAIFYTDINGKKPKKKSTIIAISRMEKKDYEKEPERFLAQKGFERVEKTIKLPKYSLFEMEKGRRRLLASSGELQKGNQVLLPEHLIRLLSYAKKVDVLVKSKDDDYDLEEHRAEFAELLDCIKKFNDMYILASSNMSKIEEIYQKNIDAPIEEVARSFVLLNFTMMGAATDFKFFGQIIPRKRYPSTTECLKSTLIHQSVTGLYETRIDLSKLGEN

SEQ ID NO: 122 - protein, 1361 aa, Streptococcus mitis
NNKPYSIGLDIGTNSVGWAVITDDYKVPSKKMKVLGNTDKHFIKKNLLGALLFDEGTTAEDRRLKRTARRRYTRRKNRLRYLQEIFTEEMSKVDISFFHRLDDSFLVPEDKRGSKYPIFATLEEEKEYHKNFPTIYHLRKHLADSKEKADFRLIYLALAHIIKYRGHFLYEESFDIKNNDIQKIFNEFISIYDNTFEGSSLNGQNAQVEAIFTDKISKSAKRERVLKLFPDEKSTGLFSEFLKLIVGNQADFKKHFDLEEKAPLQFSKDTYDEDLENLLVQIGDDFADLFLVAKKLYDAILLSGILTVTDPSTKAPLSASMIDRYENHQKDLAALKQFIKTNLPEKYDEVFSDQSKDGYAGYIDGKTTQEAFYKYIKNLLSKLEGADYFLDKIEREDFLRKQRTFDNGSIPHQIHLQEMNAIIRRQGEHYPFLQENKEKIEKILTFRIPYYVGPLARGNRDFAWLTRNSDQAIRPWNFEEIVDKARSAEDFINKMTNYDLYLPEEKVLPKHSLLYETFAVYNELTKVKFIAEGLRDYQFLDSGQKQQIVTQLFKEKRKVTEKDIIQYLHNVDSYDGIELKGIEKQFNASLSTYHDLLKIIKDKEFMDDSKNEAILENIVHTLTIFEDREMIKQRLAHYASIFDEKVIKALTRRHYTGWGKLSAKLINGIYDKQSKKTILDYLIDDGEINRNFMQLINDDGLSFKEIIQKAQVVGKTNDVKQVVQELPGSPAIKKGILQSIKLVDELVKVMGHAPESIVIEMARENQTTARGKKNSQQRYKRIEDALKNLAHNILKEHPTDNIQLQNDRLFLYYLQNGKDMYTGKSLDINQLSSCDIDHIIPQAFIKDDSLDNRVLTSSKDNRGKSDNVPSLEIVQKRKAFWQQLLDSKLISERKFNNLTKAERGGLDERDKVGFIKRQLVETRQITKHVAQILDARFNTEVTEKDKKDRSVKIITLKSNLVSNFRKEFRLYKVREINDYHHAHDPYLNAVVAKAILKKYPKLEPEFVYGDYQKYDLTKDPKEVEKATEKYFFYSNLLNFFKEEVHYADGTIVKRENIEYSKDTGEIAWNKEKDFATIKKVLSLPQVNIVKKTEEQTGGLFDNNIVSKKKVVDASKLTPIKSGLSPEKYGGYARPTIAYSVLVIADIEKGKAKKLKRIKEMVGITVQDKKKFEANPIAYLEECGYKNINPNLIIKLPKYSLFEFNNGQRRLLASSIELQKGNELIVPYHFTALLYHAQRINKISEPIHKQYVETHQSEFKELLTAIISLSKKYIQKPNVESLLQQAFDQSDKDIYQLSESFISLLKLISFGAPGTFKFLGVEISQSNVRYQSVSSCFNATLIHQSITGLYETRIDLSKLGED

SEQ ID NO: 123 - protein, 1359 aa, Streptococcus mitis; identical to SEQ ID NO: 13

SEQ ID NO: 124 - protein, 1345 aa, Streptococcus mutans
MKKPYSIGLDIGTNSVGWAVVTDDYKVPAKKMKVLGNTDKSHIEKNLLGALLFDSGNTAEDRRLKRTARRRYTRRRNRILYLQEIFSEEMGKVDDSFFHRLEDSFLVTEDKRGERHPIFGNLEEEVKYHENFPTIYHLRQYLADNPEKVDLRLVYLALAHIIKFRGHFLIEGKFDTRNNDVQRLFQEFLAVYDNTFENSSLQEQNVQVEEILTDKISKSAKKDRVLKLFPNEKSNGRFAEFLKLIVGNQADFKKHFELEEKAPLQFSKDTYEEELEVLLAQIGDNYAELFLSAKKLYDSILLSGILTVTDVGTKAPLSASMIQRYNEHQMDLAQLKQFIRQKLSDKYNEVFSDVSKDGYAGYIDGKTNQEAFYKYLKGLLNKIEGSGYFLDKIEREDFLRKQRTFDNGSIPHQIHLQEMRAIIRRQAEFYPFLADNQDRIEKLLTFRIPYYVGPLARGKSDFAWLSRKSADKITPWNFDEIVDKESSAEAFINRMTNYDLYLPNQKVLPKHSLLYEKFTVYNELTKVKYKTEQGKTAFFDANMKQEIFDGVFKVYRKVTKDKLMDFLEKEFDEFRIVDLTGLDKENKVFNASYGTYHDLCKILDKDFLDNSKNEKILEDIVLTLTLFEDREMIRKRLENYSDLLTKEQVKKLERRHYTGWGRLSAELIHGIRNKESRKTILDYLIDDGNSNRNFMQLINDDALSFKEEIAKAQVIGETDNLNQVVSDIAGSPAIKKGILQSLKIVDELVKIMGHQPENIVVEMARENQFTNQGRRNSQQRLKGLTDSIKEFGSQILKEHPVENSQLQNDRLFLYYLQNGRDMYTGEELDIDYLSQYDIDHIIPQAFIKDNSIDNRVLTSSKENRGKSDDVPSKDVVRKMKSYWSKLLSAKLITQRKFDNLTKAERGGLTDDDKAGFIKRQLVETRQITKHVARILDERFNTETDENNKKIRQVKIVTLKSNLVSNFRKEFELYKVREINDYHHAHDAYLNAVIGKALLGVYPQLEPEFVYGDYPHFHGHKENKATAKKFFYSNIMNFFKKDDVRTDKNGEIIWKKDEHISNIKKVLSYPQVNIVKKVEEQTGGFSKESILPKGNSDKLIPRKTKKFYWDTKKYGGFDSPIVAYSILVIADIEKGKSKKLKTVKALVGVTIMEKMTFERDPVAFLERKGYRNVQEENIIKLPKYSLFKLENGRKRLLASARELQKGNEIVLPNHLGTLLYHAKNIHKVDEPKHLDYVDKHKDEFKELLDVVSNFSKKYTLAEGNLEKIKELYAQNNGEDLKELASSFINLLTFTAIGAPATFKFFDKNIDRKRYTSTTEILNATLIHQSITGLYETRIDLNKLGGD

SEQ ID NO: 125 - protein, 1345 aa, Streptococcus mutans
MKKPYSIGLDIGTNSVGWAVVTDDYKVPAKKMKVLGNTDKSHIEKNLLGALLFDSGNTAEDRRLKRTARRRYTRRRNRILYLQEIFSEEMGKVDDSFFHRLEDSFLVTEDKRGERHPIFGNLEEEVKYHENFPTIYHLRQYLADNPEKVDLRLVYLALAHIIKFRGHFLIEGKFDTRNNDVQRLFQEFLAVYDNTFENSSLQEQNVQVEEILTDKISKSAKKDRVLKLFPNEKSNGRFAEFLKLIVGNQADFKKHFELEEKAPLQFSKDTYEEELEVLLAQIGDNYAELFLSAKKLYDSILLSGILTVTDVGTKAPLSASMIQRYNEHQMDLAQLKQFIRQKLSDKYNEVFSDVSKDGYAGYIDGKTNQEAFYKYLKGLLNKIEGSGYFLDKIEREDFLRKQRTFDNGSIPHQIHLQEMRAIIRRQAEFYPFLADNQDRIEKLLTFRIPYYVGPLARGKSDFAWLSRKSADKITPWNFDEIVDKESSAEAFINRMTNYDLYLPNQKVLPKHSLLYEKFTVYNELIKVKYKTEQGKTAFFDANMKQEIFDGVFKVYRKVTKDKLMDFLEKEFDEFRIVDLTGLDKENKVFNASYGTYHDLCKILDKDFLDNSKNEKILEDIVLTLTLFEDREMIRKRLENYSDLLTKEQVKKLERRHYTGWGRLSAELIHGIRNKESRKTILDYLIDDGNSNRNFMQLINDDALSFKEEIAKAQVIGETDNLNQVVSDIAGSPAIKKGILQSLKIVDELVKIMGHQPENIVVEMARENQFTNQGRRNSQQRLKGLTDSIKEFGSQILKEHPVENSQLQNDRLFLYYLQNGRDMYTGEELDIDYLSQYDIDHIIPQAFIKDNSIDNRVLTSSKENRGKSDDVPSKDVVRKMKSYWSKLLSAKLITQRKFDNLTKAERGGLTDDDKAGFIKRQLVETRQITKHVARILDERFNTETDENNKKIRQVKIVTLKSNLVSNFRKEFELYKVREINDYHHAHDAYLNAVIGKALLGVYPQLEPEFVYGDYPHFHGHKENKATAKKFFYSNIMNFFKKDDVRTDKNGEIIWKKDEHISNIKKVLSYPQVNIVKKVEEQTGGFSKESILPKGNSDKLIPRKTKKFYWDTKKYGGFDSPIVAYSILVIADIEKGKSKKLKTVKALVGVTIMEKMTFERDPVAFLERKGYRNVQEENIIKLPKYSLFKLENGRKRLLASARELQKGNEIVLPNHLGTLLYHAKNIHKVDEPKHLDYVDKHKDEFKELLDVVSNFSKKYTLAEGNLEKIKELYAQNNGEDLKELASSFINLLTFTAIGAPATFKFFDKNIDRKRYTSTTEILNATLIHQSITGLYETRIDLNKLGGD

SEQ ID NO: 126 - protein, 1345 aa, Streptococcus mutans
MKKPYSIGLDIGTNSVGWAVVTDDYKVPAKKMKVLGNTDKSHIKKNLLGALLFDSGNTAEDRRLKRTARRRYTRRRNRILYLQEIFSEEMGKVDDSFFHRLDESFLTDDDKNFDSYPIFGNKAEEDAYHQKFPTIYHLRKHLADSTEKADLRLVYLALAHMIKFRGHFLIEGELNAENTDVQKLFADFVGVYDRTFDDSHLSEITVDASSILTEKISKSRRLEKLINNYPKEKKNTLFRNLVALSLGLQPNFKTNFKLSEDAKLQFSKDTYEEDLEELLGKIGDDYADLFTLAKNLYDAILLSGILTADDSSTKAPLSASMIKRYAEHHEDLEKLKEFIKANKPELYHDIFKDETKNGYAGYIENGVKQDEFYKYLKNTLSKIAGSDYFLDKIEREDFLRKQRTFDNGSIPHQIHLQEMHAILRRQGDYYPFLKENQDRIEKILTFRIPYYVGPLARGKSDFAWLSRKSADKITPWNFDEIVDKESSVEAFINRMTNYDLYLPNQKVLPKHSLLYEKFTVYNELTKVKYKTEQGKTAFFDANMKQEIFDGVFKVYRKVTKDKLMDFLEKEFDEFRIVDLTGLDKENKAFNASYGTYHDLRKILDKDFLDNSKNEKILEDIVLTLTLFEDREMIRKRLKNYSDLLTKEQLKKLERRHYTGWGRLSAELIHGIRNKESRKTILDYLIDDGNSNRNFMQLINDDALSFKEEIAKAQVIGETDNLNQVVSDIAGSPAIKKGILQSLKIVDELVKIMGHQPENIVVEMARENQFTNQGRRNSQQRLKGLTDSIKEFGSQILKEHPVENSQLQNDRLFLYYLQNGRDMYTGEELDIDYLSQYDIDHIIPQAFIKDNSIDNRVLTSSKENRGKSDDVPSKDVVRKMKSYWSKLLSAKLITQRKFDNLTKGERGGLTDDDKAGFIKRQLVETRQITKHVARILDERFNTETDENNKKIRQVKIVTLKSNLVSNFRKEFELYKVREINDYHHAHDAYLNAVIGKALLGVYPQLEPEFVYGDYPHFHGHKENKATAKKFFYSNIMNFFKKDDVRTDKNGEIIWKKDEYISNIKKVLSYPQVNIVKKVEEQTGGFSKESILPKGDSDKLIPRKTKKFYWDTKKYGGFDSPIVAYSILVIADIEKGKSKKLKTVKALVGVTIMEKMTFERDPVAFLERKGYRNVQEENIIKLPKYSLFKLENGRKRLLASARELQKGNEIVLPNHLGTLLYHAKNIHKVDEPKHLDYVDKHKDEFKELLDVVSNFSKKYTLAEGNLEKIKELYAQNNGEDLKELASSFINLLTFTAIGAPATFKFFDKNIDRKRYTSTTEILNATLIHQSITGLYETRIDLSKLGGD

SEQ ID NO: 127 - protein, 1345 aa, Streptococcus mutans
MKKPYSIGLDIGTNSVGWAVVTDDYKVPAKKMKVLGNTDKSHIKKNLLGALLFDSGNTAEDRRLKRTARRRYTRRRNRILYLQEIFSEEMGKVDDSFFHRLEDSFLVTEDKRGERHPIFGNLEEEVKYHENFPTIYHLRQYLADNPEKTDLRLVYLALAHIIKFRGHFLIEGKFDTRNNDVQRLFQEFLAVYDNTFENSSLQEQNVQVEEILTDKISKSAKKDRVLKLFPNEKSNGRFAEFLKLIVGNQADFKKHFELEEKAPLQFSKDIYEEELEVLLAQIGDNYAELFLSAKKLYDSILLSGILTVTDVSTKAPLSASMIQRYNEHQMDLAQLKQFIRQKLSDKYNEVFSDVSKDGYAGYIDGKTNQEAFYKYLKGLLNKIEGSGYFLDKIEREDFLRKQRTFDNGSIPHQIHLQEMRAIIRRQAEFYPFLADNQDRIEKILTFRIPYYVGPLARGKSDFAWLSRKSADKITPWNFDEIVDKESSVEAFINRMTNYDLYLPNQKVLPKHSLLYEKFTVYNELTKVKYKTEQGKTAFFDANMKQEIFDGVFKVYRKVTKDKLMDFLEKEFDEFRIVDLTGLDKENKAFNASYGTYHDLRKILDKDFLDNSKNEKILEDIVLTLTLFEDREMIRKRLKNYSDLLTKEQLKKLERRHYTGWGRLSAELIHGIRNKESRKTILDYLIDDGNSNRNFMQLINDDALSFKEEIAKAQVIGETDNLNQVVSDIAGSPAIKKGILQSLKIVDELVKIMGHQPENIVVEMARENQFTNQGRRNSQQRLKGLTDSIKEFGSQILKEHPVENSQLQNDRLFLYYLQNGRDMYTGEELDIDYLSQYDIDHIIPQAFIKDNSIDNRVLTSSKENRGKSDDVPSKDVVRKMKSYWSKLLSAKLITQRKFDNLTKAERGGLTDDDKAGFIKRQLVETRQITKHVARILDERFNTETDENNKKIRQVKIVTLKSNLVSNFRKEFELYKVREINDYHHAHDAYLNAVIGKALLGVYPQLEPEFVYGDYPHFHGHKENKATAKKFFYSNIMNFFKKDDVRTDKNGEIIWKKDEHISNIKKVLSYPQVNIVKKVEEQTGGFSKESILPKGNSDKLIPRKTKKFYWDTKKYGGFDSPIVAYSILVIADIEKGKSKKLKTVKALVGVTIMEKMTFERDPVAFLERKGYRNVQEENIIKLPKYSLFKLENGRKRLLASARELQKGNEIVLPNHLGTLLYHAKNIHKVDEPKHLDYVDKHKDEFKELLDVVSNFSKKYTLAEGNLEKIKELYAQNNGEDLKELASSFINLLTFTAIGAPATFKFFDKNIDRKRYTSTTEILNATLIHQSITGLYETRIDLNKLGGD

SEQ ID NO: 128 - protein, 1345 aa, Streptococcus mutans
MKKPYSIGLDIGTNSVGWAVVTDDYKVPAKKMKVLGNTDKSHIKKNLLGALLFDSGNTAEDRRLKRTARRRYTRRRNRILYLQEIFSEEMGKVDDSFFHRLEDSFLVTEDKRGERHPIFGNLEEEVKYHENFPTIYHLRQYLADNPEKVDLRLVYLALAHIIKFRGHFLIEGKFDTRNNDVQRLFQEFLAVYDNTFENSSLQEQNVQVEEILTDKISKSAKKDRVLKLFPNEKSNGRFAEFLKLIVGNQADFKKHFELEEKAPLQFSKDTYEEELEVLLAQIGDNYAELFLSAKKLYDSILLSGILTVTDVSTKAPLSASMIQRYNEHQMDLAQLKQFIRQKLSDKYNEVFSDVSKDGYAGYIDGKTNQEAFYKYLKGLLNKIEGSGYFLDKIEREDFLRKQRTFDNGSIPHQIHLQEMRAIIRRQAEFYPFLADNQDRIEKILTFRIPYYVGPLARGKSDFAWLSRKSADKITPWNFDEIVDKESSAEAFINRMTNYDLYLPNQKVLPKHSLLYEKFTVYNELTKVKYKTEQGKTAFFDANMKQEIFDGVFKVYRKVTKDKLMDFLEKEFDEFRIVDLTGLDKENKVFNASYGTYHDLCKILDKDFLDNSKNEKILEDIVLTLTLFEDREMIRKRLENYSDLLTKEQVKKLERRHYTGWGRLSAELIHGIRNKESRKTILDYLIDDGNSNRNFMQLINDDALSFKEEIAKAQVIGETDNLNQVVSDIAGSPAIKKGILQSLKIVDELVKIMGHQPENIVVEMARENQFTNQGRQNSQQRLKGLTDSIKEFGSQILKEHPVENSQLQNDRLFLYYLQNGRDMYTGEELDIDYLSQYDIDHIIPQAFIKDNSIDNRVLTSSKENRGKSDDVPSEDVVRKMKSYWSKLLSAKLITQRKFDNLTKAERGGLTDDDKAGFIKRQLVETRQITKHVARILDERFYTETDENNKKIRQVKIVTLKSNLVSNFRKEFELYKVREINDYHHAHDAYLNAVIGKALLGVYPQLEPEFVYGDYPHFHGHKENKATAKKFFYSNIMNFFKKDDVRTDKNGEIIWKKDEHISNIKKVLSYPQVNIVKKVEEQTGGFSKESILPKGNSDKLIPRKTKKFYWDTKKYGGFDSPIVAYSILVIADIEKGKSKKLKTVKALVGVTIMEKMTFERDPVAFLERKGYRNVQEENIIKLPKYSLFKLENGRKRLLASARELQKGNEIVLPNHLGTLLYHAKNIHKVDEPKHLDYVDKHKDEFKELLDVVSNFSKKYTLAEGNLEKIKELYAQNNGEDLKELASSFINLLTFTAIGAPATFKFFDKNIDRKRYTSTTEILNATLIHQSITGLYETRIDLSKLGGD

SEQ ID NO: 129 - protein, 1345 aa, Streptococcus mutans
MKKPYSIGLDIGTNSVGWAVVTDDYKVPAKKMKVLGNTDKSHIKKNLLGALLFDSGNTAEDRRLKRTARRRYTRRRNRILYLQEIFSEEMGKVDDSFFHRLEDSFLVTEDKRGERHPIFGNLEEEVKYHENFPTIYHLRQYLADNPEKVDLRLVYLALAHIIKFRGHFLIEGKFDTRNNDVQRLFQEFLAVYDNTFENSSLQEQNVQVEEILTDKISKSAKKDRVLKLFPNEKSNGRFAEFLKLIVGNQADFKKHFELEEKAPLQFSKDTYEEDLEELLGKIGDDYADLFTLAKNLYDAILLSGILTADDSSTKAPLSASMIQRYNEHQMDLAQLKQFIRQKLSDKYNEVFSDVSKDGYAGYIDGKTNQEAFYKYLKGLLNKIEGSGYFLDKIEREDFLRKQRTFDNGSIPHQIHLQEMRAIIRRQAEFYPFLADNQDRIEKILTFRIPYYVGPLARGKSDFAWLSRKSADKITPWNFDEIVDKESSAEAFINRMTNYDLYLPNQKVLPKHSLLYEKFTVYNELTKVKYKTEQGKTAFFDANMKQEIFDGVFKVYRKVTKDKLMDFLEKEFDEFRIVDLTGLDKENKVFNASYGTYHDLCKILDKDFLDNSKNEKILEDIVLTLTLFEDREMIRKRLENYSDLLTKEQVKKLERRHYTGWGRLSAELIHGIRNKESRKTILDYLIDDGNSNRNFMQLINDDALSFKEEIAKAQVIGETDNLNQVVSDIAGSPAIKKGILQSLKIVDELVKIMGHQPENIVVEMARENQFTNQGRRNSQQRLKGLTDSIKEFGSQILKEHPVENSQLQNDRLFLYYLQNGRDMYTGEELDIDYLSQYDIDHIIPQAFIKDNSIDNRVLTSSKENRGKSDDVPSKDVVRKMKSYWSKLLSAKLITQRKFDNLTKAERGGLTDDDKAGFIKRQLVETRQITKHVARILDERFYTETDENNKKIRQVKIVTLKSNLVSNFRKEFELYKVREINDYHHAHDAYLNAVIGKALLGVYPQLEPEFVYGDYPHFHGHKENKATAKKFFYSNIMNFFKKDDVRTDKNGEIIWKKDEHISNIKKVLSYPQVNIVKKVEEQTGGFSKESILPKGNSDKLIPRKTKKFYWDTKKYGGFDSPIVAYSILVIADIEKGKSKKLKTVKALVGVTIMEKMTFERDPVAFLERKGYRNVQEENIIKLPKYSLFKLENGRKRLLASARELQKGNEIVLPNHLGTLLYHAKNIHKVDEPKHLDYVDKHKDEFKELLDVVSNFSKKYTLAEGNLEKIKELYAQNNGEDLKELASSFINLLTFTAIGAPATFKFFDKNIDRKRYTSTTEILNATLIHQSITGLYETRIDLSKLGGD

SEQ ID NO: 130 - protein, 1345 aa, Streptococcus mutans
MKKPYSIGLDIGTNSVGWAVVTDDYKVPAKKMKVLGNTDKSHIKKNLLGALLFDSGNTAEDRRLKRTARRRYTRRRNRILYLQEIFSEEMGKVDDSFFHRLEDSFLVTEDKRGERHPIFGNLEEEVKYHENFPTIYHLRQYLADNPEKVDLRLVYLALAHIIKFRGHFLIEGKFDTRNNDVQRLFQEFLAVYDNTFENSSLQEQNVQVEEILTDKISKSAKKDRVLKLFPNEKSNGRFAEFLKLIVGNQADFKKHFELEEKAPLQFSKDTYEEDLEELLGKIGDDYADLFTLAKNLYDAILLSGILTADDSSTKAPLSASMIQRYNEHQMDLAQLKQFIRQKLSDKYNEVFSDVSKDGYAGYIDGKTNQEAFYKYLKGLLNKIEGSGYFLDKIEREDFLRKQRTFDNGSIPHQIHLQEMRAIIRRQAEFYPFLADNQDRIEKILTFRIPYYVGPLARGKSDFAWLSRKSADKITPWNFDEIVDKESSAEAFINRMTNYDLYLPNQKVLPKHSLLYEKFTVYNELTKVKYKTEQGKTAFFDANMKQEIFDGVFKVYRKVTKDKLMDFLEKEFDEFRIVDLTGLDKENKVFNASYGTYHDLCKILDKDFLDNSKNEKILEDIVLTLTLFEDREMIRKRLENYSDLLTKEQVKKLERRHYTGWGRLSAELIHGIRNKESRKTILDYLIDDGNSNRNFMQLINDDALSFKEEIAKAQVIGETDNLNQVVSDIAGSPAIKKGILQSLKIVDELVKIMGHQPENIVVEMARENQFTNQGRRNSQQRLKGLTDSIKEFGSQILKEHPVENSQLQNDRLFLYYLQNGRDMYTGEELDIDYLSQYDIDHIIPQAFIKDNSIDNRVLTSSKENRGKSDDVPSKDVVRKMKPYWSKLLSAKLITQRKFDNLTKAERGGLTDDDKAGFIKRQLVETRQITKHVARILDERFNTETDENNKKIRQVKIVTLKSNLVSNFRKEFELYKVREINDYHHAHDAYLNAVIGKALLGVYPQLEPEFVYGDYPHFHGHEENKATAKKFFYSNIMNFFKKDDVRTDKNGEIIWKKDEHISNIKKVLSYPQVNIVKKVEEQTGGFSKESILPKGNSDKLIPRKTKKFYWDTKKYGGFDSPIVAYSILVIADIEKGKSKKLKTVKALVGVTIMEKMTFERDPVAFLERKGYRNVQEENIIKLPKYSLFKLENGRKRLLASARELQKGNEIVLPNHLGTLLYHAKNIHKVDEPKHLDYVDKHKDEFKELLDVVSNFSKKYTLAEGNLEKIKELYAQNNGEDLKELASSFINLLTFTAIGAPATFKFFDKNIDRKRYTSTTEILNATLIHQSITGLYETRIDLSKLGGD

SEQ ID NO: 131 - protein, 1345 aa, Streptococcus mutans
MKKPYSIGLDIGTNSVGWAVVTDDYKVPAKKMKVLGNTDKSHIKKNLLGALLFDSGNTAEDRRLKRTARRRYTRRRNRILYLQEIFSEEMGKVDDSFFHRLEDSFLVTEDKRGERHPIFGNLEEEVKYHENFPTIYHLRQYLADNPEKVDLRLVYLALAHIIKFRGHFLIEGKFDTRNNDVQRLFQEFLAVYDNTFENSSLQEQNVQVEEILTDKISKSAKKDRVLKLFPNEKSNGRFAEFLKLIVGNQADFKKHFELEEKAPLQFSKDTYEEELEVLLAQIGDNYAELFLSAKKLYDSILLSGILTVTDVSTKAPLSASMIQRYNEHQMDLAQLKQFIRQKLSDKYNEVFSDVSKDGYAGYIDGKTNQEAFYKYLKGLLNKIEGSGYFLDKIEREDFLRKQRTFDNGSIPHQIHLQEMRAIIRRQAEFYPFLADNQDRIEKILTFRIPYYVGPLARGKSDFAWLSRKSADKITPWNFDEIVDKESSAEAFINRMTNYDLYLPNQKVLPKHSLLYEKFTVYNELTKVKYKTEQGKTAFFDANMKQEIFDGVFKVYRKVTKDKLMDFLEKEFDEFRIVDLTGLDKENKVFNASYGTYHDLCKILDKDFLDNSKNEKILEDIVLTLTLFEDREMIRKRLENYSDLLTKEQVKKLERRHYTGWGRLSAELIHGIRNKESRKTILDYLIDDGNSNRNFMQLINDDALSFKEEIAKAQVIGETDNLNQVVSDIAGSPAIKKGILQSLKIVDELVKIMGHQPENIVVEMARENQFTKQGRRNSQQRLKGLTDSIKEFGSQILKEHPVENSQLQNDRLFLYYLQNGRDMYTGEELDIDYLSQYDIDHIIPQAFIKDNSIDNRVLTSSKENRGKSDDVPSKDVVRKMKSYWSKLLSAKLITQRKFDNLTKAERGGLTDDDKAGFIKRQLVETRQITKHVARILDERFYTETDENNKKIRQVKIVTLKSNLVSNFRKEFELYKVREINDYHHAHDAYLNAVIGKALLGVYPQLEPEFVYGDYPHFHGHKENKATAKKFFYSNIMNFFKKDDVRTDKNGEIIWKKDEHISNIKKVLSYPQVNIVKKVEEQTGGFSKESILPKGNSDKLIPRKTKKFYWDTKKYGGFDSPIVAYSILVIADIEKGKSKKLKTVKALVGVTIMEKMTFERDPVAFLERKGYRNVQEENIIKLPKYSLFKLENGRKRLLASARELQKGNEIVLPNHLGTLLYHAKNIHKVDEPKHLDYVDKHKDEFKELLDVVSNFSKKYTLAEGNLEKIKELYAQNNGEDLKELASSFINLLTFTAIGAPATFKFFDKNIDRKRYTSTTEILNATLIHQSITGLYETRIDLSKLGGD

SEQ ID NO: 132 - protein, 1345 aa, Streptococcus mutans
MKKPYSIGLDIGTNSVGWAVVTDDYKVPAKKMKVLGNTDKSHIKKNLLGALLFDSGNTAADRRLKRTARRRYTRRRNRILYLQEIFAEEMSKVDDSFFHRLEDSFLVTEDKRGERHPIFGNLEEEVKYHENFPTIYHLRQYLADNPEKVDLRLVYLALAHIIKFRGHFLIEGKFDTRNNDVQRLFQEFLAVYDNTFENSSLQEQNVQVEEILTDKISKSAKKDRVLKLFPNEKSNGRFAEFLKLIVGNQADFKKHFELEEKAPLQFSKDTYEEELEVLLTQIGDNYAELFLSAKKLYDSILLSGILTVTDVSTKAPLSASMIQRYNEHQMDLAQLKQFIRQKLSDKYNEVFSDVSKDGYAGYIDGKTNQEAFYKYLKGLLNKIEGSGYFLDKIEREDFLRKQRTFDNGSIPHQIHLQEMRAIIRRQAEFYPFLADNQDRIEKILTFRIPYYVGPLARGKSDFAWLSRKSADKITPWNFDEIVDKESSAEAFINRMTNYDLYLPNQKVLPKHSLLYEKFTVYNELTKVKYKTEQGKTAFFDANMKQEIFDGVFKVYRKVTKDKLMDFLEKEFDEFRIVDLTGLDKENKAFNASYGTYHDLRKILDKDFLDNSKNEKILEDIVLTLTLFEDREMIRKRLENYSDLLTKEQVKKLERRHYTGWGRLSAELIHGIRNKESRKTLLDYLIDDGNSNRNFMQLINDDALSFKEEIAKAQVIGETDNLNQVVSDIAGSPAIKKGILQSLKIVDELVKIMGHQPENIVVEMARENQFTNQGRRNSQQRLKGLTDSIKEFGSQILKEHPVENSQLQNDRLFLYYLQNGRDMYTGEELDIDYLSQYDIDHIIPQAFIKDNSIDNRVLTSSKENRGKSDDVPSKDVVRKMKPYWSKLLSAKLITQRKFDNLTKAERGGLTDDDKAGFIKRQLVETRQITKHVARILDERFNTETDENNKKIRQVKIVTLKSNLVSNFRKEFELYKVREINDYHHAHDAYLNAVIGKALLGVYPQLEPEFVYGDYPHFHGHEENKATAKKFFYSNIMNFFKKDDVRTDKNGEIIWKKDEHISNIKKVLSYPQVNIVKKVEEQTGGFSKESILPKGNSDKLIPRKTKKFYWDTKKYGGFDSPIVAYSILVIADIEKGKSKKLKTVKALVGVTIMEKMTFERDPVAFLERKGYRNVQEENIIKLPKYSLFKLENGRKRLLASARELQKGNEIVLPNHLGTLLYHAKNIHKVDEPKHLDYVDKHKDEFKELLDVVSNFSKKYTLAEGNLEKIKELYAQNNGEDLKELSSSFINLLTFTAIGAPAAFKFFDKNIDRKRYTSTTEILNATLIHQSITGLYETRIDLSKLGGD

SEQ ID NO: 133 - protein, 1345 aa, Streptococcus mutans
MKKPYSIGLDIGTNSVGWAVVTDDYKVPAKKMKVLGNTDKSHIKKNLLGALLFDSGNTAEDRRLKRTARRRYTRRRNRILYLQEIFSEEMGKVDDSFFHRLEDSFLVTEDKRGERHPIFGNLEEEVKYHENFPTIYHLRQYLADNPEKVDLRLVYLALAHIIKFRGHFLIEGKFDTRNNDVQRLFQEFLAVYDNTFENSSLQEQNVQVEEILTDKISKSAKKDRVLKLFPNEKSNGRFAEFLKLIVGNQADFKKHFELEEKAPLQFSKDTYEEELEVLLAQIGDNYAELFLSAKKLYDSILLSGILTVTDVSTKAPLSASMIQRYNEHQMDLAQLKQFIRQKLSDKYNEVFSDVSKDGYAGYIDGKTNQEAFYKYLKGLLNKIEGSGYFLDKIEREDFLRKQRTFDNGSIPHQIHLQEMRAIIRRQAEFYPFLADNQDRIEKILTFRIPYYVGPLARGKSDFAWLSRKSADKITPWNFDEIVDKESSAEAFINRMTNYDLYLPNQKVLPKHSLLYEKFTVYNELTKVKYKTEQGKTAFFDANMKQEIFDGVFKVYRKVTKDKLMDFLEKEFDEFRIVDLTGLDKENKVFNASYGTYHDLCKILDKDFLDNSKNEKILEDIVLTLTLFEDREMIRKRLENYSDLLTKEQVKKLERRHYTGWGRLSAELIHGIRNKESRKTILDYLIDDGNSNRNFMQLINDDALSFKEEIAKAQVIGETDNLNQVVSDIAGSPAIKKGILQSLKIVDELVKIMGHQPENIVVEMARENQFTKQGRRNSQQRLKGLTDSIKEFGSQILKEHPVENSQLQNDRLFLYYLQNGRDMYTGEELDIDYLSQYDIDHIIPQAFIKDNSIDNRVLTSSKENRGKSDDVPSKDVVRKMKSYWSKLLSAKLITQRKFDNLTKAERGGLTDDDKAGFIKRQLVETRQITKHVARILDERFYTETDENNKKIRQVKIVTLKSNLVSNFRKEFELYKVREINDYHHAHDAYLNAVIGKALLGVYPQLEPEFVYGDYPHFHGHKENKATAKKFFYSNIMNFFKKDDVRTDRNGEIIWKKDEHISNIKKVLSYPQVNIVKKVEEQTGGFSKESILPKGNSDKLIPRKTKKFYWDTKKYGGFDSPIVAYSILVIADIEKGKSKKLKTVKALVGVTIMEKMTFERDPVAFLERKGYRNVQEENIIKLPKYSLFKLENGRKRLLASARELQKGNEIVLPNHLGTLLYHAKNIHKVDEPKHLDYVDKHKDEFKELLDVVSNFSKKYTLAEGNLEKIKELYAQNNGEDLKELASSFINLLTFTAIGAPATFKFFDKNIDRKRYTSTTEILNATLIHQSITGLYETRIDLSKLGGD

SEQ ID NO: 134 - protein, 1336 aa, Streptococcus mutans
MKKSYSIGLDIGTNSVGWAVVTDDYKVPAKKMKVLGNTDKSHIKKNLLGALLFDSGNTAEDRRLKRTARRRYTRRRNRILYLQEIFSEEMGKVDDSFFHRLDESFLTDDDKNFDSHPIFGNKAEEDAYHQKFPTIYHLRKHLADSTEKADLRLVYLALAHMIKFRGHFLIEGELNAENTDVQKLFADFVGVYDRTFDDSHLSEITVDASSILTEKISKSRRLEKLINNYPKEKKNTLFGNLIALSLGLQPNFKTNFKLSEDAKLQFSKDTYEEDLEELLGKIGDDYADLFTLAKNLYDAILLSGILTADDSSTKAPLSASMIKRYAEHHEDLEKLKEFIKANKPELYHDIFKDETKNGYAGYIENGVKQDEFYKYLKNTLSKIAGSDYFLDKIEREDFLRKQRTFDNGSIPHQIHLQEMHAILRRQGDYYPFLKENQDRIEKILTFRIPYYVGPLARKNSRFAWAEYHSDEAVMPWNFDQVIDKESSAQAFIEHMTNNDLYLPNEKVLPKHSPLYEKYTVYNELTKIKYVTEIGEAKFFDANLKQEIFDGLFKHERKVTKKKLRTFLDKNFDEFRIVDIQGLDKETETFNASYATYQDLLKVIKDKVFMDNPENAEILENIVLTLTLFEDREMIKQRLAKYADVFDKKVIDQLARRHYTGWGRLSAKLLNGIRDKQSCKTIMDYLIDDAQSNRNLMQLITDDNLTFKDDIVKAQYVDNSDDLHQVVQSLAGSPAIKKGILQSLKIVDELVKVMGKEPEQIVVEMARENQTTAKGRRNSQQRYKRLKEAIKDLNHKILKEHPTDNQALQNNRLFLYYLQNGRDMYTGESLDINRLSDYDIDHVIPQAFIKDNSIDNRVLTSSKANRGKSDDVPSEDVVNRMRPFWNKLLSSGLISQRKYNNLTKKELTPDDKAGFIKRQLVETRQITKHVARMLDERFNKEFDDNNKRIRRVKIVTLKSNLVSSFRKEFELYKVREINDYHHAHDAYLNAVVVKALLVKYPKLEPEFVYGEYPKYNSYRERKATQKMFFYSNIMNMFKSKVKLADDQIVERPMIEVNDETGEIAWDKTKHITTVKKVLSYPQVNIVKKVEEQTGGLFDPKSPLEKLVPLKKALNPEKYGGYQKPTTAYPILLIVDTKQLIPISVMDKKRFEQNPVKFLKDKGYQQIEKNNFVKLPKYTLVDIGNGIKRLWASSKEVHKGNQLVVSKKSQDLLYHAHHLDNDYSNEYVKNHYQQFDILFNEITSFSKKCKLGKEHIQKIEEAYSKERDSASIEELADGFIKLLGFTQLGATSPFSFLGIKLNQKQYTGKKDYLEATLIHQSITGLYETRIDLNKLGGD

SEQ ID NO: 135 - protein, 1345 aa, Streptococcus mutans
MKKPYSIGLDIGTNSVGWAVVTDDYKVPAKKMKVLGNTDKSHIKKNLLGALLFDSGNTAADRRLKRTARRRYTRRRNRILYLQEIFAEEMSKVDDSFFHRLEDSFLVTEDKRGERHPIFGNLEEEVKYHENFPTIYHLRQYLADNPEKVDLRLVYLALAHIIKFRGHFLIEGKFDTRNNDVQRLFQEFLAVYDNTFENSSLQEQNVQVEEILTDKISKSAKKDRVLKLFPNEKSNGRFAEFLKLIVGNQADFKKHFELEEKAPLQFSKDTYEEELEVLLAQIGDNYAELFLSAKKLYDSILLSGILTVTDVSTKAPLSASMIQRYNEHQMDLAQLKQFIRQKLSDKYNEVFSDVSKDGYAGYIDGKTNQEAFYKYLKGLLNKIEGSGYFLDKIEREDFLRKQRTFDNGSIPHQIHLQEMRAIIRRQAEFYPFLADNQDRIEKILTFRIPYYVGPLARGKSDFAWLSRKSADKITPWNFDEIVDKESSAEAFINRMTNYDLYLPNQKVLPKHSLLYEKFTVYNELTKVKYKTEQGKTAFFDANMKQEIFDGVFKVYRKVTKDKLMDFLEKEFDEFRIVDLTGLDKENKAFNASYGTYHDLRKILDKDFLDNSKNEKILEDIVLTLTLFEDREMIRKRLENYSDLLTKEQVKKLERRHYTGWGRLSAELIHGIRNKESRKTILDYLIDDGNSNRNFMQLINDDALSFKEEIAKAQVIGETDNLNQVVSDIAGSPAIKKGILQSLKIVDELVKIMGHQPENIVVEMARENQFTNQGRRNSQQRLKGLTDSIKEFGSQILKEHPVEHSQLQNDRLFLYYLQNGRDMYTGEELDIDYLSQYDIDHIIPQAFIKDNSIDNRVLTSSKENRGKSDDVPSKNVVRKMKSYWSKLLSAKLITQRKFDNLTKAERGGLTDDDKAGFIKRQLVETRQITKHVARILDERFHTETDENNKKIRQVKIVTLKSNLVSNFRKEFELYKVREINDYHHAHDAYLNAVIGKALLGVYPQLEPEFVYGDYPHFHGHKENKATAKKFFYSNIMNFFKKDDVRTDKNGEIIWKKDEHISNIKKVLSYPQVNIVKKVEEQTGGFSKESILPKGNSDKLIPRKTKKFYWDTKKYGGFDSPIVAYSILVIADIEKGKSKKLKTVKALVGVTIMEKMTFERDPVAFLERKGYRNVQEENIIKLPKYSLFKLENGRKRLLASARELQKGNEIVLPNHLGTLLYHAKNIHKVDEPKHLDYVDKHKDEFKELLDVVSNFSKKYTLAEGNLEKIKELYAQNNGEDLKELASSFINLLTFTAIGAPATFKFFDKNIDRKRYTSTTEILNATLIHQSITGLYETRIDLSKLGGD

SEQ ID NO: 136 - protein, 1345 aa, Streptococcus mutans
MKKPYSIGLDIGTNSVGWAVVTDDYKVPAKKMKVLGNTDKSHIEKNLLGALLFDSGNTAEDRRLKRTARRRYTRRRNRILYLQEIFSEEMGKVDDSFFHRLEDFFLVTEDKRGERHPIFGNLEEEVKYHENFPTIYHLRQYLADNPEKVDLRLVYLALAHIIKFRGHFLIEGKFDTRNNDVQRLFQEFLAVYDNTFENSSLQEQNVQVEEILTDKISKSAKKDRVLKLFPNEKSNGRFAEFLKLIVGNQADFKKHFELEEKAPLQFSKDTYEEELEVLLAQIGDNYAELFLSAKKLYDSILLSGILTADDSSTKAPLSASMIQRYNEHQMDLAQLKQFIRQKLSDKYNEVFSDVSKDGYAGYIDGKTNQEAFYKYLKGLLNKIEGSGYFLDKIEREDFLRKQRTFDNGSIPHQIHLQEMRAIIRRQSEFYPFLADNQDRIEKILTFRIPYYVGPLARGKSDFAWLSRKSADKITPWNFDEIVDKESSAEAFINRMTNYDLYLPNQKVLPKHSLLYEKFTVYNELTKVKYKTEQGETAFFDANMKQEIFDGVFKVYRKVTKDKLMDFLEKEFDEFRIVDLTGLDKENKAFNASYGTYHDLRKILDKDFLDNSKNEKILEDIVLTLTLFEDREMIRKRLKNYSDLLTKEQLKKLERRHYTGWGRLSAELIHGIRNKESRKTILDYLIDDGNSNRNFMQLINDDALSFKEEIAKAQVIGETDNLNQVVSDIAGSPAIKKGILQSLKIVDELVKIMGHQPENIVVEMARENQFTNQGRRNSQQRLKGLTDSIKEFGSQILKEHPVENSQLQNDRLFLYYLQNGRDMYTGEELDIDYLSQYDIDHIIPQAFIKDNSIDNRVLTSSKENRGKSDDVPSKDVVRKMKPYWSKLLSAKLITQRKFDNLTKAERGGLTDDDKAGFIKRQLVETRQITKHVARILDERFNTETDENNKKIRQVKIVTLKSNLVSNFRKEFELYKVREINDYHHAHDAYLNAVIGKALLGVYPQLEPEFVYGDYPHFHGHEENKATAKKFFYSNIMNFFKKDDVRTDKNGEIIWKKDEHISNIKKVLSYPQVNIVKKVEEQTGGFSKESILPKGNSDKLIPRKTKKFYWDTKKYGGFDSPIVAYSILVIADIEKGKSKKLKTVKALVGVTIMEKMTFERDPVAFLERKGYRNVQEENIIKLPKYSLFKLENGRKRLLASARELQKGNEIVLPNHLGTLLYHAKNIHKVDEPKHLDYVDKHKDEFKELLDVVSNFSKKYTLAEGNLEKIKELYAQNNGEDLKELASSFINLLTFTAIGAPATFKFFDKNIDRKRYTSTTEILNATLIHQSITGLYETRIDLSKLGGD

SEQ ID NO: 137 - protein, 1345 aa, Streptococcus mutans
MKKPYSIGLDIGTNSVGWAVVTDDYKVPAKKMKVLGNTDKSHIKKNLLGALLFDSGNTAEDRRLKRTARRRYTRRRNRILYLQEIFSEEMGKVDDSFFHRLDESFLTDDDKNFDSHPIFGNKAEEDAYHQKFPTIYHLRKHLADSTEKADLRLVYLALAHMIKFRGHFLIEGELNAENTDVQKLFADFVGVYDRTFDDSHLSEITVDASSILTEKISKSRRLEKLINNYPKEKKNTLFGNLIALSLGLQPNFKTNFKLSEDAKLQFSKDTYEEELEVLLAQIGDNYAELFLSAKKLYDSILLSGILTVTDVSTKAPLSASMIQRYNEHQMDLAQLKQFIRQKLSDKYNEVFSDVSKDGYAGYIDGKTNQEAFYKYLKGLLNKIEGSGYFLDKIEREDFLRKQRTFDNGSIPHQIHLQEMRAIIRRQAEFYPFLADNQDRIEKILTFRIPYYVGPLARGKSDFAWLSRKSADKITPWNFDEIVDKESSVEAFINRMTNYDLYLPNQKVLPKHSLLYEKFTVYNELTKVKYKTEQGKTAFFDANMKQEIFDGVFKVYRKVTKDKLMDFLEKEFDEFRIVDLTGLDKENKAFNASYGTYHDLRKILDKDFLDNSKNEKILEDIVLTLTLFEDREMIRKRLKNYSDLLTKEQLKKLERRHYTGWGRLSAELIHGIRNKESRKTILDYLIDDGNSNRNFMQLINDDALSFKEEIAKAQVIGETDNLNQVVSDIAGSPAIKKGILQSLKIVDELVKIMGHQPENIVVEMARENQFTNQGRRNSQQRLKGLTDSIKEFGSQILKEHPVENSQLQNDRLFLYYLQNGRDMYTGEELDIDYLSQYDIDHIIPQAFIKDNSIDNRVLTSSKENRGKSDDVPSKDVVRKMKSYWSKLLSAKLITQRKFDNLTKGERGGLTDDDKAGFIKRQLVETRQITKHVARILDERFNTETDENNKKIRQVKIVTLKSNLVSNFRKEFELYKVREINDYHHAHDAYLNAVIGKALLGVYPQLEPEFVYGDYPHFHGHKENKATAKKFFYSNIMNFFKKDDVRTDKNGEIIWKKDEYISNIKKVLSYPQVNIVKKVEEQTGGFSKESILPKGDSDKLIPRKTKKFYWDTKKYGGFDSPIVAYSILVIADIEKGKSKKLKTVKALVGVTIMEKMTFERDPVAFLERKGYRNVQEENIIKLPKYSLFKLENGRKRLLASARELQKGNEIVLPNHLGTLLYHAKNIHKVDEPKHLDYVDKHKDEFKELLDVVSNFSKKYTLAEGNLEKIKELYAQNNGEDLKELASSFINLLTFTAIGAPATFKFFDKNIDRKRYTSTTEILNATLIHQSITGLYETRIDLSKLGGD

SEQ ID NO: 138 - protein, 1345 aa, Streptococcus mutans
MKKPYSIGLDIGTNSVGWAVVTDDYKVPAKKMKVLGNTDKSHIKKNLLGALLFDSGNTAADRRLKRTARRRYTRRRNRILYLQEIFAEEMSKVDDSFFHRLEDSFLVTEDKRGERHPIFGNLEEEVKYHENFPTIYHLRQYLADNPEKVDLRLVYLALAHIIKFRGHFLIEGKFDTRNNDVQRLFQEFLAVYDNTFENSSLQEQNVQVEEILTDKISKSAKKDRVLKLFPNEKSNGRFAEFLKLIVGNQADFKKHFELEEKAPLQFSKDTYEEELEVLLAQIGDNYAELFLSAKKLYDSILLSGILTVTDVSTKAPLSASMIQRYNEHQMDLAQLKQFIRQKLSDKYNEVFSDVSKDGYAGYIDGKTNQEAFYKYLKGLLNKIEGSGYFLDKIEREDFLRKQRTFDNGSIPHQIHLQEMRAIIRRQAEFYPFLADNQDRIEKILTFRIPYYVGPLARGKSDFAWLSRKSADKITPWNFDEIVDKESSAEAFINRMTNYDLYLPNQKVLPKHSLLYEKFTVYNELTKVKYKTEQGKTAFFDANMKQEIFDGVFKVYRKVTKDKLMDFLEKEFDEFRIVDLTGLDKENKVFNASYGTYHDLCKILDKDFLDNSKNEKILEDIVLTLTLFEDREMIRKRLENYSDLLTKEQVKKLERRHYTGWGRLSAELIHGIRNKESRKTILDYLIDDGNSNRNFMQLINDDALSFKEEIAKAQVIGETDNLNQVVSDIAGSPAIKKGILQSLKIVDELVKIMGHQPENIVVEMARENQFTKQGRRNSQQRLKGLTDSIKEFGSQILKEHPVENSQLQNDRLFLYYLQNGRDMYTGEELDIDYLSQYDIDHIIPQAFIKDNSIDNRVLTSSKENRGKSDDVPSKDVVRKMKSYWSKLLSAKLITQRKFDNLTKAERGGLTDDDKAGFIKRQLVETRQITKHVARILDERFYTETDENNKKIRQVKIVTLKSNLVSNFRKEFELYKVREINDYHHAHDAYLNAVIGKALLGVYPQLEPEFVYGDYPHFHGHKENKATAKKFFYSNIMNFFKKDDVRTDKNGEIIWKKDEHISNIKKVLSYPQVNIVKKVEEQTGGFSKESILPKGNSDKLIPRKTKKFYWDTKKYGGFDSPIVAYSILVIADIEKGKSKKLKTVKALVGVTIMEKMTFERDPVAFLERKGYRNVQEENIIKLPKYSLFKLENGRKRLLASARELQKGNEIVLPNHLGTLLYHAKNIHKVDEPKHLDYVDKHKDEFKELLDVVSNFSKKYTLAEGNLEKIKELYAQNNGEDLKELASSFINLLTFTAIGAPATFKFFDKNIDRKRYTSTTEILNATLIHQSITGLYETRIDLSKLGGD

SEQ ID NO: 139 - protein, 1345 aa, Streptococcus mutans
MKKPYSIGLDIGTNSVGWAVVTDDYKVPAKKMKVLGNTDKSHIKKNLLGALLFDSGNTAADRRLKRTARRRYTRRRNRILYLQEIFAEEMSKVDDSFFHRLEDSFLVTEDKRGERHPIFGNLEEEVKYHENFPTIYHLRQYLADNPEKVDLRLVYLALAHIIKFRGHFLIEGKFDTRNNDVQRLFQEFLAVYDNTFENSSLQEQNVQVEEILTDKISKSAKKDRVLKLFPNEKSNGRFAEFLKLIVGNQADFKKHFELEEKAPLQFSKDTYEEELEVLLAQIGDNYAELFLSAKKLYDSILLSGILTVTDVSTKAPLSASMIQRYNEHQMDLAQLKQFIRQKLSDKYNEVFSDVSKDGYAGYIDGKTNQEAFYKYLKGLLNKIEGSGYFLDKIEREDFLRKQRTFDNGSIPHQIHLQEMRAIIRRQAEFYPFLADNQDRIEKILTFRIPYYVGPLARGKSDFAWLSRKSADKITPWNFDEIVDKESSAEAFINRMTNYDLYLPNQKVLPKHSLLYEKFTVYNELTKVKYKTEQGKTAFFDANMKQEIFDGVFKVYRKVTKDKLMDFLEKEFDEFRIVDLTGLDKENKAFNASYGTYHDLRKILDKDFLDNSKNEKILEDIVLTLTLFEDREMIRKRLENYSDLLTKEQVKKLERRHYTGWGRLSAELIHGIRNKESRKTILDYLIDDGNSNRNFMQLINDDALSFKEEIAKAQVIGETDNLNQVVSDIAGSPAIKKGILQSLKIVDELVKIMGHQPENIVVEMARENQFTNQGRRNSQQRLKGLTDSIKEFGSQILKEHPVENSQLQNDRLFLYYLQNGRDMYTGEELDIDYLSQYDIDHIIPQAFIKDNSIDNRVLTSSKENRGKSDDVPSKNVVRKMKSYWSKLLSAKLITQRKFDNLTKAERGGLTDDDKAGFIKRQLVETRQITKHVARILDERFHTETDENNKKIRQVKIVTLKSNLVSNFRKEFELYKVREINDYHHAHDAYLNAVIGKALLGVYPQLEPEFVYGDYPHFHGHKENKATAKKFFYSNIMNFFKKDDVRTDKNGEIIWKKDEHISNIKKVLSYPQVNIVKKVEEQTGGFSKESILPKGNSDKLIPRKTKKFYWDTKKYGGFDSPIVAYSILVIADIEKGKSKKLKTVKALVGVTIMEKMTFERDPVAFLERKGYRNVQEENIIKLPKYSLFKLENGRKRLLASARELQKGNEIVLPNHLGTLLYHAKNIHKVDEPKHLDYVDKHKDEFKELLDVVSNFSKKYTLAEGNLEKIKELYAQNNGEDLKELSSSFINLLTFTAIGAPAAFKFFDKNIDRKRYTSTTEILNATLIHQSITGLYETRIDLSKLGGD

SEQ ID NO: 140 - protein, 1336 aa, Streptococcus mutans
MKKPYSIGLDIGTNSVGWAVVTDDYKVPAKKMKVLGNTDKSHIKKNLLGALLFDSGNTAEDRRLKRTARRRYTRRRNRILYLQEIFAEEMSKVDDSFFHRLDESFLTDDDKNFDSHPIFGNKAEEDAYHQKFPTIYHLRKHLADSTEKADLRLVYLALAHMIKFRGHFLIEGELNAENTDVQKLFADFVGVYDRTFDDSHLSEITVDASSILTEKISKSRRLEKLINNYPKEKKNTLFGNLIALSLGLQPNFKTNFKLSEDAKLQFSKDTYEEDLEELLGKIGDDYADLFTLAKNLYDAILLSGILTADDSSTKAPLSASMIKRYAEHHEDLEKLKEFIKANKPELYHDIFKDETKNGYAGYIENGVKQDEFYKYLKNTLSKITGSDYFLDQIEREDFLRKQRTFDNGSIPHQIHLQEMHAILRRQGDYYPFLKENQDRIEKILTFRIPYYVGPLARKNSRFAWAEYHSDEAVTPWNFDQVIDKESSAQAFIEHMTNNDLYLPNEKVLPKHSPLYEKYTVYNELTKIKYVTEIGEAKFFDANLKQEIFDGLFKHERKVTKKKLRTFLDKNFDEFRIVDIQGLDKETETFNASYATYQDLLKVIKDKVFMDNPENAEILENIVLTLTLFEDREMIKQRLAKYADVFDKKVIDQLARRHYTGWGRLSAKLLNGIRDKQSCKTIMDYLIDDAQSNRNLMQLITDDNLTFKDDIVKAQYVDNSDDLHQVVQSLAGSPAIKKGILQSLKIVDELVKVMGKEPEQIVVEMARENQTTAKGRRNSQQRYKRLKEAIKDLNHKILKEHPTDNQALQNNRLFLYYLQNGRDMYTGESLDINRLSDYDIDHVIPQAFIKDNSIDNRVLTSSKANRGKSDDVPSEDVVNRMRPFWNKLLSSGLISQRKYNNLTKKELTLDDKAGFIKRQLVETRQITKHVARMLDERFNKEFDDNNKRIRRVKIVTLKSNLVSSFRKEFELYKVREINDYHHAHDAYLNAVVVKALLVKYPKLEPEFVYGEYPKYNSYRERKATQKMFFYSNIMNMFKSKVKLADDQIVERPMIEVNDETGEIAWDKTKHITTVKKVLSYPQVNIVKKVEEQTGGLFDPKSPLEKLVPLKKALNPEKYGGYQKPTTAYPILLIVDTKQLIPISVMDKKRFEQNPVKFLKDKGYQQIEKNNFVKLPKYTLVDIGNGIKRLWASSKEVHKGNQLVVSKKSQDLLYHAHHLDNDYSNEYVKNHYQQFDILFNEITSFSKKCKLGKEHIQKIEEAYSKERDFASIEELADGFIKLLGFTQLGATSPFSFLGIKLNQKQYTGKKDYLEATLIHQSITGLYETRIDLSKLGGD

SEQ ID NO: 141 - protein, 1345 aa, Streptococcus mutans
MKKPYSIGLDIGTNSVGWSVVTDDYKVPAKKMKVLGNTDKSHIEKNLLGALLFDSGNTAEDRRLKRTARRRYTRRRNRILYLQEIFSEEMGKVDDSFFHRLEDSFLVTEDKRGERHPIFGNLEEEVKYHENFPTIYHLRQYLADNPEKVDLRLVYLALAHIIKFRGHFLIEGKFDTRNNDVQRLFQEFLAVYDNTFENSSLQEQNVQVEEILTDKISKSAKKDRVLKLFPNEKSNGRFAEFLKLIVGNQADFKKHFELEEKAPLQFSKDTYEEELEVLLAQIGDNYAELFLSAKKLYDSILLSGILTVTDVGTKAPLSASMIQRYNEHQMDLAQLKQFIRQKLSDKYNEVFSDVSKDGYAGYIDGKTNQEAFYKYLKGLLNKIEGSGYFLDKIEREDFLRKQRTFDNGSIPHQIHLQEMRAIIRRQAEFYPFLADNQDRIEKLLTFRIPYYVGPLARGKSDFAWLSRKSADKITPWNFDEIVDKESSAEAFINRMTNYDLYLPNQKVLPKHSLLYEKFTVYNELTKVKYKTEQGKTAFFDANMKQEIFDGVFKVYRKVTKDKLMDFLEKEFDEFRIVDLTGLDKENKVFNASYGTYHDLCKILDKDFLDNSKNEKILEDIVLTLTLFEDREMIRKRLENYSDLLTKEQVKKLERRHYTGWGRLSAELIHGIRNKESRKTILDYLIDDGNSNRNFMQLINDDALSFKEEIAKAQVIGETDNLNQVVSDIAGSPAIKKGILQSLKIVDELVKIMGHQPENIVVEMARENQFTNQGRRNSQQRLKGLTDSIKEFGSQILKEHPVENSQLQNDRLFLYYLQNGRDMYTGEELDIDYLSQYDIDHIIPQAFIKDNSIDNRVLTSSKENRGKSDDVPSKDVVRKMKSYWSKLLSAKLITQRKFDNLTKAERGGLTDDDKAGFIKRQLVETRQITKHVARILDERFNTETDENNKKIRQVKIVTLKSNLVSNFRKEFELYKVREINDYHHAHDAYLNAVIGKALLGVYPQLEPEFVYGDYPHFHGHKENKATAKKFFYSNIMNFFKKDDVRIDKNGEIIWKKDEHISNIKKVLSYPQVNIVKKVEEQTGGFSKESILPKGNSDKLIPRKTKKFYWDTKKYGGFDSPIVAYSILVIADIEKGKSKKLKTVKALVGVTIMEKMTFERDPVAFLERKGYRNVQEENIIKLPKYSLFKLENGRKRLLASARELQKGNEIVLPNHLGTLLYHAKNIHKVDEPKHLDYVDKHKDEFKELLDVVSNFSKKYTLAEGNLEKIKELYAQNNGEDLKELASSFINLLTFTAIGAPATFKFFDKNIDRKRYTSTTEILNATLIHQSITGLYETRIDLSKLGGD

SEQ ID NO: 142 - protein, 1345 aa, Streptococcus mutans
MKKPYSIGLDIGTNSVGWAVVTDDYKVPAKKMKVLGNTDKSHIKKNLLGALLFDSGNTAEDRRLKRTARRRYTRRRNRILYLQEIFSEEMGKVDDSFFHRLEDSFLVTEDKRGERHPIFGNLEEEVKYHENFPTIYHLRQYLADNPEKTDLRLVYLALAHIIKFRGHFLIEGKFDTRNNDVQRLFQEFLAVYDNTFENSSLQEQNVQVEEILTDKISKSAKKDRVLKLFPNEKSNGRFAEFLKLIVGNQADFKKHFELEEKAPLQFSKDIYEEELEVLLAQIGDNYAELFLSAKKLYDSILLSGILTVTDVSTKAPLSASMIQRYNEHQMDLAQLKQFIRQKLSDKYNEVFSDVSKDGYAGYIDGKTNQEAFYKYLKGLLNKIEGSGYFLDKIEREDFLRKQRTFDNGSIPHQIHLQEMRAIIRRQAEFYPFLADNQDRIEKILTFRIPYYVGPLARGKSDFAWLSRKSADKITPWNFDEIVDKESSVEAFINRMTNYDLYLPNQKVLPKHSLLYEKFTVYNELTKVKYKTEQGKTAFFDANMKQEIFDGVFKVYRKVTKDKLMDFLEKEFDEFRIVDLTGLDKENKAFNASYGTYHDLRKILDKDFLDNSKNEKILEDIVLTLTLFEDREMIRKRLKNYSDLLTKEQLKKLERRHYTGWGRLSAELIHGIRNKESRKTILDYLIDDGNSNRNFMQLINDDALSFKEEIAKAQVIGETDNLNQVVSDIAGSPAIKKGILQSLKIVDELVKIMGHQPENIVVEMARENQFTNQGRRNSQQRLKGLTDSIKEFGSQILKEHPVENSQLQNDRLFLYYLQNGRDMYTGEELDIDYLSQYDIDHIIPQAFIKDNSIDNRVLTSSKENRGKSDDVPSKNVVRKMKSYWSKLLSAKLITQRKFDNLTKAERGGLTDDDKAGFIKRQLVETRQITKHVARILDERFHTETDENNKKIRQVKIVTLKSNLVSNFRKEFELYKVREINDYHHAHDAYLNAVIGKALLGVYPQLEPEFVYGDYPHFHGHKENKATAKKFFYSNIMNFFKKDDVRTDKNGEIIWKKDEHISNIKKVLSYPQVNIVKKVEEQTGGFSKESILPKGNSDKLIPRKTKKFYWDTKKYGGFDSPIVAYSILVIADIEKGKSKKLKTVKALVGVTIMEKMTFERDPVAFLERKGYRNVQEENIIKLPKYSLFKLENGRKRLLASARELQKGNEIVLPNHLGTLLYHAKNIHKVDEPKHLDYVDKHKDEFKELLDVVSNFSKKYTLAEGNLEKIKELYAQNNGEDLKELASSFINLLTFTAIGAPATFKFFDKNIDRKRYTSTTEILNATLIHQSITGLYETRIDLSKLGGD

SEQ ID NO: 143 - protein, 1345 aa, Streptococcus mutans
MKKPYSIGLDIGTNSVGWAVVTDDYKVSAKKMKVLGNTDKSHIKKNLLGALLFDSGNTAEDRRLKRTARRRYTRRRNRILYLQEIFAEEMSKVDDSFFHRLEDSFLVTEDKRGERHPIFGNLEEEVKYHENFPTIYHLRQYLADNPEKVDLRLVYLALAHIIKFRGHFLIEGKFDTRNNDVQRLFQEFLAVYDNTFENSSLQEQNVQVEEILTDKISKSAKKDRVLKLFPNEKSNGRFAEFLKLIVGNQADFKKHFELEEKAPLQFSKDTYEEELEVLLAQIGDNYAELFLSAKKLYDSILLSGILTVTDVSTKAPLSASMIQRYNEHQMDLAQLKQFIRQKLSDKYNEVFSDVSKDGYAGYIDGKTNQEAFYKYLKGLLNKIEGSGYFLDKIEREDFLRKQRTFDNGSIPHQIHLQEMRAIIRRQAEFYPFLADNQDRIEKILTFRIPYYVGPLARGKSDFAWLSRKSADKITPWNFDEIVDKESSAEAFINRMTNYDLYLPNQKVLPKHSLLYEKFTVYNELTKVKYKTEQGKTAFFDANMKQEIFDGVFKVYRKVTKDKLMDFLEKEFDEFRIVDLTGLDKENKAFNASYGTYHDLRKILDKDFLDNSKNEKILEDIVLTLTLFEDREMIRKRLENYSDLLTKEQVKKLERRHYTGWGRLSAELIHGIRNKESRKTILDYLIDDGNSNRNFMQLINDDALSFKEEIAKAQVIGETDNLNQVVSDIAGSPAIKKGILQSLKIVDELVKIMGHQPENIVVEMARENQFTNQGRRNSQQRLKGLTDSIKEFGSQILKEHPVEHSQLQNDRLFLYYLQNGRDMYTGEELDIDYLSQYDIDHIIPQAFIKDNSIDNRVLTSSKENRGKSDDVPSKNVVRKMKSYWSKLLSAKLITQRKFDNLTKAERGGLTDDDKAGFIKRQLVETRQITKHVARILDERFHTETDENNKKIRQVKIVTLKSNLVSNFRKEFELYKVREINDYHHTHDAYLNAVIGKALLGVYPQLEPEFVYGDYPHFHGHKENKATAKKFFYSNIMNFFKKDDVRTDKNGEIIWKKDEHISNIKKVLSYPQVNIVKKVEEQTGGFSKESILPKGNSDKLIPRKTKKFYWDTKKYGGFDSPIVAYSILVIADIEKGKSKKLKTVKALVGVTIMEKMTFERDPVAFLERKGYRNVQEENIIKLPKYSLFKLENGRKRLLASARELQKGNEIVLPNHLGTLLYHAKNIHKVDEPKHLDYVDKHKDEFKELLDVVSNFSKKYTLAEGNLEKIKELYAQNNGEDLKELASSFINLLTFTAIGAPATFKFFDKNIDRKRYTSTTEILNATLIHQSITGLYETRIDLSKLGGD

SEQ ID NO: 144 - protein, 1345 aa, Streptococcus mutans
MKKPYSIGLDIGTNSVGWAVVTDDYKVPAKKMKVLGNTDKSHIKKNLLGALLFDSGNTAEDRRLKRTARRRYTRRRNRILYLQEIFSEEMGKVDDSFFHRLEDSFLVTEDKRGERHPIFGNLEEEVKYHENFPTIYHLRQYLADNPEKTDLRLVYLALAHIIKFRGHFLIEGKFDTRNNDVQRLFQEFLAVYDNTFENSSLQEQNVQVEEILTDKISKSAKKDRVLKLFPNEKSNGRFAEFLKLIVGNQADFKKHFELEEKAPLQFSKDIYEEELEVLLAQIGDNYAELFLSAKKLYDSILLSGILTVTDVSTKAPLSASMIQRYNEHQMDLAQLKQFIRQKLSDKYNEVFSDVSKDGYAGYIDGKTNQEAFYKYLKGLLNKIEGSGYFLDKIEREDFLRKQRTFDNGSIPHQIHLQEMRAIIRRQAEFYPFLADNQDRIEKILTFRIPYYVGPLARGKSDFAWLSRKSADKITPWNFDEIVDKESSVEAFINRMTNYDLYLPNQKVLPKHSLLYEKFTVYNELTKVKYKTEQGKTAFFDANMKQEIFDGVFKVYRKVTKDKLMDFLEKEFDEFRIVDLTGLDKENKAFNASYGTYHDLRKILDKDFLDNSKNEKILEDIVLTLTLFEDREMIRKRLKNYSDLLTKEQLKKLERRHYTGWGRLSAELIHGIRNKESRKTILDYLIDDGNSNRNFMQLINDDALSFKEEIAKAQVIGETDNLNQVVSDIAGSPAIKKGILQSLKIVDELVKIMGHQPENIVVEMARENQFTNQGRRNSQQRLKGLTDSIKEFGSQILKEHPVENSQLQNDRLFLYYLQNGRDMYTGEELDIDYLSQYDIDHIIPQAFIKDNSIDNRVLTSSKENRGKSDDVPSKDVVRKMKSYWSKLLSAKLITQRKFDNLTKAERGGLTDDDKAGFIKRQLVETRQITKHVARILDERFNTETDENNKKIRQVKIVTLKSNLVSNFRKEFELYKVREINDYHHAHDAYLNAVIGKALLGVYPQLEPEFVYGDYPHFHGHKENKATAKKFFYSNIMNFFKKDDVRTDKNGEIIWKKDEHISNIKKVLSYPQVNIVKKVEEQTGGFSKESILPKGNSYKLIPRKTKKFYWDTKKYGGFDSPIVAYSILVIADIEKGKSKKLKTVKALVGVTIMEKMTFERDPVAFLERKGYRNVQEENIIKLPKYSLFKLENGRKRLLASARELQKGNEIVLPNHLGTLLYHAKNIHKVDEPKHLDYVDKHKDEFKELLDVVSNFSKKYTLAEGNLEKIKELYAQNNGEDLKELASSFINLLTFTAIGAPAAFKFFDKNIDRKRYTSTTEILNATLIHQSITGLYETRIDLSKLGGD

SEQ ID NO: 145 - protein, 1345 aa, Streptococcus mutans
MKKPYSIGLDIGTNSVGWAVVTDDYKVPAKKMKVLGNTDKSHIKKNLLGALLFDSGNTAEDRRLKRTTRRRYTRRRNRILYLQEIFSEEMGKVDDSFFHRLEDSFLVTEDKRGERHPIFGNLEEEVKYHENFPTIYHLRQYLADNPEKTDLRLVYLALAHIIKFRGHFLIEGKFDTRNNDVQRLFQEFLAVYDNTFENSSLQEQNVQVEEILTDKISKSAKKDRVLKLFPNEKSNGCFAEFLKLIVGNQADFKKHFELEEKAPLQFSKDTYEEELEVLLAQIGDNYAELFLSAKKLYDSILLSGILTVTDVSTKAPLSASMIQRYNEHQMDLTQLKQFIRQKLSDKYNEVFSDVSKDGYAGYIDGKTNQEAFYKYLKGLLNKIEGSGYFLDKIEREDFLRKQRTFDNGSIPHQIHLQEMRAIIRRQAEFYPFLADNQDRIEKLLTFRIPYYVGPLASGKSDFAWLSRKSADKITPWNFDEIVDKESSAEAFINRMTNYDLYLPNQKVLPKHSLLYEKFTVYNELTKVKYKTEQGKTAFFDANMKQEIFDGVFKVYRKVTKDKLMDFLEKEFDEFRIVDLTGLDKENKVFNASYGTYHDLCKILDKDFLDNSKNEKILEDIVLTLTLFEDREMIRKRLENYSDLLTKEQVKKLERRHYTGWGRLSAELIHGIRNKESRKTILDYLIDDGNSNRNFMQLINDDALSFKEEIAKAQVIGETDNLNQVVSDIAGSPAIKKGILQSLKIVDELVKIMGHQPENIVVEMARENQFTNQGRRNSQQRLKGLTDSIKEFGSQILKEHPVENSQLQNDRLFLYYLQNGRDMYTGEELDIDYLSQYDIDHIIPQAFIKDNSIDNRVLTSSKENRGKSDDVPSKDVVRKMKSYWSKLLSAKLITQRKFDNLTKAERGGLTDDDKAGFIKRQLVETRQITKHVARILDERFNTETDENNKKIRQVKIVTLKSNLVSNFRKEFELYKVREINDYHHAHDAYLNAVIGKALLGVYPQLEPEFVYGDYPHFHGHKENKATAKKFFYSNIMNFFKKDDVRTDKNGEIIWKKDEHISNIKKVLSYPQVNIVKKVEEQTGGFSKESILPKGNSDKLIPRKTKKFYWDTKKYGGFDSPIVAYSILVIADIEKGKSKKLKTVKALVGVTIMEKMTFERDPVAFLERKGYRNVQEENIIKLPKYSLFKLENGRKRLLASARELQKGNEIVLPNHLGTLLYHAKNIHKVDEPKHLDYVDKHKDEFKELLDVVSNFSKKYTLAEGNLEKIKELYAQNNGEDLKELASSFINLLTFTAIGAPATFKFFDKNIDRKRYTSTTEILNATLIHQSITGLYETRIDLSKLGGD

SEQ ID NO: 146 - protein, 1345 aa, Streptococcus mutans
MKKPYSIGLDIGTNSVGWAVVTDDYKVPAKKMKVLGNTDKSHIKKNLLGALLFDSGNTAEDRRLKRTARRRYTRRRNRILYLQEIFSEEMGKVDDSFFHRLEDSFLVTEDKRGERHPIFGNLEEEVKYHENFPTIYHLRQYLADNPEKTDLRLVYLALAHIIKFRGHFLIEGKFDTRNNDVQRLFQEFLAVYDNTFENSSLQEQNVQVEEILTDKISKSAKKDRVLKLFPNEKSNGRFAEFLKLIVGNQADFKKHFELEEKAPLQFSKDIYEEELEVLLAQIGDNYAELFLSAKKLYDSILLSGILTVTDVSTKAPLSASMIQRYNEHQMDLAQLKQFIRQKLSDKYNEVFSDVSKDGYAGYIDGKTNQEAFYKYLKGLLNKIEGSGYFLDKIEREDFLRKQRTFDNGSIPHQIHLQEMRAIIRRQAEFYPFLADNQDRIEKILTFRIPYYVGPLARGKSDFAWLSRKSADKITPWNFDEIVDKESSAEAFINRMTNYDLYLPNQKVLPKHSLLYEKFTVYNELTKVKYKTEQGKTAFFDANMKQEIFDGVFKVYRKVTKDKLMDFLEKEFDEFRIVDLTGLDKENKAFNASYGTYHDLRKILDKDFLDNSKNEKILEDIVLTLTLFEDREMIRKRLKNYSDLLTKEQLKKLERRHYTGWGRLSAELIHGIRNKESRKTILDYLIDDGNSNRNFMQLINDDALSFKEEIAKAQVIGETDNLNQVVSDIAGSLAIKKGILQSLKIVDELVKIMGHQPENIVVEMARENQFTNQGRRNSQQRLKGLTDSIKEFGSQILKEHPVENSQLQNDRLFLYYLQNGRDMYTGEELDIDYLSQYDIDHIIPQAFIKDNSIDNRVLTSSKENRGKSDDVPSKDVVRKMKSYWSKLLSAKLITQRKFDNLTKGERGGLTDDDKAGFIKRQLVETRQITKHVARILDERFNTETDENNKKIRQVKIVTLKSNLVSNFRKEFELYKVREINDYHHAHDAYLNAVIGKALLGVYPQLEPEFVYGDYPHFHGHKENKATAKKFFYSNIMNFFKKDDVRTDKNGEIIWKKDEYISNIKKVLSYPQVNIVKKVEEQTGGFFKESILPKGDSDKLIPRKTKKFYWDTKKYGGFDSPIVAYSILVIADIEKGKSKKLKTVKALVGVTIMEKMTFERDPVAFLERKGYRNVQEENIIKLPKYSLFKLENGRKRLLASARELQKGNEIVLPNHLGTLLYHAKNIHKVDEPKHLDYVDKHKDEFKELLDVVSNFSKKYTLAEGNLEKIKELYAQNNGEDLKELASSFINLLTFTAIGAPATFKFFDKNIDRKRYTSTTEILNATLIHQSITGLYETRIDLSKLGGD

SEQ ID NO: 147 - protein, 1345 aa, Streptococcus mutans
MKKPYSIGLDIGTNSVGWAVVTDDYKVPAKKMKVLGNTDKSHIKKNLLGALLFDSGNTAEDRRLKRTARRRYTRRRNRILYLQEIFSEEMGKVNDSFFHRLEDSFLVTEDKRGERHPIFGNLEEEVKYHENFPTIYHLRQYLADNPEKVDLRLVYLALAHIIKFRGHFLIEGKFDTRNNDVQRLFQEFLAVYDNTFENSSLQEQNVQVEEILTDKISKSAKKDRVLKLFPNEKSNGRFAEFLKLIVGNQADFKKHFELEEKAPLQFSKDTYEEELEVLLAQIGDNYAELFLSAKKLYDSILLSGILTVTDVSTKAPLSASMIQRYNEHQMDLAQLKQFIRQKLSDKYNEVFSDVSKDGYAGYIDGKTNQEAFYKYLKGLLNKIEGSGYFLDKIEREDFLRKQRTFDNGSIPHQIHLQEMRAIIRRQAEFYPFLADNQDRIEKILTFRIPYYVGPLARGKSDFAWLSRKSADKITPWNFDEIVDKESSAEAFINRMTNYDLYLPNQKVLPKHSLLYEKFTVYNELTKVKYKTEQGKTAFFDANMKQEIFDGVFKVYRKVTKDKLMDFLEKEFDEFRIVDLTGLDKENKVFNASYGTYHDLCKILDKDFLDNSKNEKILEDIVLTLTLFEDREMIRKRLENYSDLLTKEQVKKLERRHYTGWGRLSAELIHGIRNKESRKTILDYLIDDGNSNRNFMQLINDDALSFKEEIAKAQVIGETDNLNQVVSDIAGSPAIKKGILQSLKIVDELVKIMGHQPENIVVEMARENQFTKQGRRNSQQRLKGLTDSIKEFGSQILKEHPVENSQLQNDRLFLYYLQNGRDMYTGEELDIDYLSQYDIDHIIPQAFIKDNSIDNRVLTSSKENRGKSDDVPSKDVVRKMKSYWSKLLSAKLITQRKFDNLTKAERGGLTDDDKAGFIKRQLVETRQITKHVARILDERFYTETDENNKKIRQVKIVTLKSNLVSNFRKEFELYKVREINDYHHAHDAYLNAVIGKALLGVYPQLEPEFVYGDYPHFHGHKENKATAKKFFYSNIMNFFKKDDVRTDKNGEIIWKKDEYISNIKKVLSYPQVNIVKKVEEQTGGFSKESILPKGNSDKLIPRKTKKFYWDTKKYGGFDSPIVAYSILVIADIEKGKSKKLKTVKALVGVTIMEKMTFERDPIAFLERKGYRNVQEENIIKLPKYSLFKLENGRKRLLASARELQKGNEIVLPNHLGTLLYHAKNIHKVDEPKHLDYVDKHKDEFKELLDVVSNFSKKYTLAEGNLEKIKELYAQNNGEDLKELASSFINLLTFTAIGAPAAFKFFDKNIDRKRYTSTTEILNATLIHQSITGLYETRIDLSKLGGD

SEQ ID NO: 148 - protein, 1345 aa, Streptococcus mutans
MKKPYSIGLDIGTNSVGWAVVTDDYKVPAKKMKVLGNTDKSHIKKNLLGALLFDSGNTAEDRRLKRTARRRYTRRRNRILYLQEIFSEEMGKVDDSFFHRLEDSFLVTEDKRGERHPIFGNLEEEVKYHENFPTIYHLRQYLADNPEKTDLRLVYLALAHIIKFGGHFLIEGKFDTRNNDVQRLFQEFLAVYDNTFENSSLQEQNVQVEEILTDKISKSAKKDRVLKLFPNEKSNGRFAEFLKLIVGNQADFKKHFELEEKAPLQFSKDIYEEELEVLLAQIGDNYAELFLSAKKLYDSILLSGILTVTDVSTKAPLSASMIQRYNEHQMDLAQLKQFIRQKLSDKYNEVFSDVSKDGYAGYIDGKTNQEAFYKYLKGLLNKIEGSGYFLDKIEREDFLRKQRTFDNGSIPHQIHLQEMRAIIRRQAEFYPFLADNQDRIEKILTFRIPYYVGPLARGKSDFAWLSRKSADKITPWNFDEIVDKESSVEAFINRMTNYDLYLPNQKVLPKHSLLYEKFTVYNELTKVKYKTEQGKTAFFDANMKQEIFDGVFKVYRKVTKDKLMDFLEKEFDEFRIVDLTGLDKENKAFNASYGTYHDLRKILDKDFLDNSKNEKILEDIVLTLTLFEDREMIRKRLKNYSDLLTKEQLKKLERRHYTGWGRLSAELIHGIRNKESRKTILDYLIDDGNSNRNFMQLINDDALSFKEEIAKAQVIGETDNLNQVVSDIAGSPAIKKGILQSLKIVDELVKIMGHQPENIVVEMARENQFTNQGRRNSQQRLKGLTDSIKEFGSQILKEHPVENSQLQNDRLFLYYLQNGRDMYTGEELDIDYLSQYDIDHIIPQAFIKDNSIDNRVLTSSKENRGKSDDVPSKNVVRKMKSYWSKLLSAKLITQRKFDNLTKAERGGLTDDDKAGFIKRQLVETRQITKHVARILDERFHTETDENNKKIRQVKIVTLKSNLVSNFRKEFELYKVREINDYHHAHDAYLNAVIGKALLGVYPQLEPEFVYGDYPHFHGHKENKATAKKFFYSNIMNFFKKDDVRTDKNGEIIWKKDEHISNIKKVLSYPQVNIVKKVEEQTGGFSKESILPKGNSDKLIPRKTKKFYWDTKKYGGFDSPIVAYSILVIADIEKGKSKKLKTVKALVGVTIMEKMTFERDPVAFLERKGYRNVQEENIIKLPKYSLFKLENGRKRLLASARELQKGNEIVLPNHLGTLLYHAKNIHKVDEPKHLDYVDKHKDEFKELLDVVSNFSKKYTLAEGNLEKIKELYAQNNGEDLKELASSFINLLTFTAIGAPATFKFFDKNIDRKRYTSTTEILNATLIHQSITGLYETRIDLSKLGGD

SEQ ID NO: 149 - protein, 1345 aa, Streptococcus mutans
MKKPYSIGLDIGTNSVGWAVVTDDYKVPAKKMKVLGNTDKSHIKKNLLGALLFDSGNTAEDRRLKRTARRRYTRRRNRILYLQEIFAEEMMQVDESFFQRLDDSFLVEEDKRGSRYPIFGTLKEEKKYHKEFKTIYHLREKLANSTEKADLRLVYLSLAHMIKFRGHFLIEGQLKAENTNVQALFKDFVEVYDKTVEESHLSEMTVDALSILTEKVSKSRRLENLVECYPTEKKNTLFGNLIALSLGLQPNFKTNFQLSEDAKLQFSKDTYEEDLEGLLGEIGDEYADLFASAKNLYDAILLSGILAVDDNTTKAPLSASMVKRYKEHKEELAAFKRFIKEKLPKKYEEIFKDDTKNGYAGYVGADATEEEFYKYVKGILNKVEGADVWLDKIDREDFLRKQRTFDNGSIPHQIHLQEMHAILRRQGEHYPFLKENQDKIEKILTFRIPYYVGPLVRKGSRFAWAEYKADEKITPWNFDDILDKEKSAEKFITRMTLNDLYLPEEKVLPKHSLLYETFTVYNELTKVKYVNEQGEAKFFDANMKQEIFDHVFKENRKVTKDKLLNYLNKEFEEFRIVNLTGLDKENKVFNSSLGTYHDLRKILNKSFLDNKENEQIIEDIIQTLTLFEDREMIRQRLQKYSDIFTKAQLKKLERRHYTGWGRLSYKLINGIRDKQSNKTILGYLIDDGYSNRNFMQLINDDALSFKEEIAKAQVIGEMDGLNQVVSDIAGSPAIKKGILQSLKIVDELVKVMGHNPANIVIEMARENQTTAKGRRSSQKRYKRLEEAIKDLNHKILKEHPTDNQALQNDRLFLYYLQNGRDMYTEDPLDINRLSDYDIDHIIPQAFIKDNSIDNRVLTRSDKNRGKSDDVPSEEVVHKMKPFWSKLLSAKLITQRKFDNLTKAERGGLTDDDKAGFIKRQLVETRQITKHVARILDERFNTETDENNKKIRQVKIVTLKSNLVSNFRKEFELYKVREINDYHHAHDAYLNAVIGKALLGVYPQLEPEFVYGDYPHFHGHKENKATAKKFFYSNIMNFFKKGDVRTDKNGEIIWKKDEHISNIKKVLSYPQVNIVKKVEEQTGGFSKESILPKGNSDKLIPRKTKKFYWDTKKYGGFDSPIVAYSILVIADIEKGKSKKLKTVKALVGVTIMEKMTFERDPVAFLERKGYRNVQEENIIKLPKYSLFKLENGRKRLLASARELQKGNEIVLPNHLETLLYHAKNIHKVDEPKHLDYVDKHKDEFKELLDVVSNFSKKYTLAEGNLEKIKELYAQNNGEDLKELASSFINLLTFTAIGAPAAFKFFDKNIDRKRYTSTTEILNATLIHQSITGLYETRIDLNKLGGD

SEQ ID NO: 150 - protein, 1345 aa, Streptococcus mutans
MKKPYSIGLDIGTNSVGWAVVTDDYKVPAKKMKVLGNTDKSHIKKNLLGALLFDSGNTAEDRRLKRTARRRYTRRRNRILYLQEIFSEEMDKVDDSFFHRLEDSFLVTEDKRGERHPIFGNLEEEVKYHENFPTIYHLRQYLADNPEKVDLRLVYLALAHIIKFRGHFLIEGKFDTRNNDVQRLFQEFLAVYDNTFENSSLQEQNVQVEEILTDKISKSAKKDRVLKLFPNEKSNGRFAEFLKLIVGNQADFKKHFELEEKAPLQFSKDTYEEELEVLLAQIGDNYAELFLSAKKLYDSILLSGILTVTDVSTKAPLSASMIQRYNEHQMDLAQLKQFIRQKLSDKYNEVFSDVSKDGYAGYIDGKTNQEAFYKYLKGLLNKIEGSGYFLDKIEREDFLRKQRTFDNGSIPHQIHLQEMRAIIRRQAEFYPFLADNQDRIEKILTFRIPYYVGPLARGKSDFAWLSRKSADKITPWNFDEIVDKESSAEAFINRMTNYDLYLPNQKVLPKHSLLYEKFTVYNELTKVKYKTEQGKTAFFDANMKQEIFDGVFKVYRKVTKDKLMDFLEKEFDEFRIVDLTGLDKENKVFNASYGTYHDLCKILDKDFLDNSKNEKILEDIVLTLTLFEDREMIRKRLENYSDLLTKEQVKKLERRHYTGWGRLSAELIHGIRNKESRKTILDYLIDDGNSNRNFMQLINDDALSFKEEIAKAQVIGETDNLNQVVSDIAGSPAIKKGILQSLKIVDELVKIMGHQPENIVVEMARENQFTKQGRRNSQQRLKGLTDSIKEFGSQILKEHPVENSQLQNDRLFLYYLQNGRDMYTGEELDIDYLSQYDIDHIIPQAFIKDNSIDNRVLTSSKENRGKSDDVPSKDVVRKMKSYWSKLLSAKLITQRKFDNLTKAERGGLTDDDKAGFIKRQLVETRQITKHVARILDERFYTETDENNKKIRQVKIVTLKSNLVSNFRKEFELYKVREINDYHHAHDAYLNAVIGKALLGVYPQLEPEFVYGDYPHFHGHKENKATAKKFFYSNIMNFFKKDDVRTDKNGEIIWKKDEHISNIKKVLSYPQVNIVKKVEEQTGGFSKESILPKGNSDKLIPRKTKKFYWDTKKYGGFDSPIVAYSILVIADIEKGKSKKLKTVKALVGVTIMEKMTFERDPVAFLERKGYRNVQEENIIKLPKYSLFKLENGRKRLLASARELQKGNEIVLPNHLGTLLYHAKNIHKVDEPKHLDYVDKHKDEFKELLDVVSNFSKKYTLAEGNLEKIKELYAQNNGEDLKELASSFINLLTFTAIGAPATFKFFDKNIDRKRYTSTTEILNATLIHQSITGLYETRIDLSKLGGD

SEQ ID NO: 151 - protein, 1345 aa, Streptococcus mutans
MKKPYSIGLDIGTNSVGWAVVTDDYKVPAKKMKVLGNTDKSHIKKNLLGALLFDSGNTAEDRRLKRTARRRYTRRRNRILYLQEIFSEEMGKVDDSFFHRLEDSFLVTEDKRGERHPIFGNLEEEVKYHENFPTIYHLRQYLADNPEKVDLRLVYLALAHIIKFRGHFLIEGKFDTRNNDVQKLFQEFLAVYDNTFENSSLQEQNVQVEEILTDKISKSAKKDRVLKLFPNEKSNGRFAEFLKLIVGNQADFKKHFELEEKAPLQLSKDTYEEELEVLLAQIGDNYAELFLSAKKLYDSILLSGILTVTDVSTKAPLSASMIQRYNEHQMDLAQLKQFIRQKLSDKYNEVFSDVSKDGYAGYIDGKTNQEAFYKYLKGLLNKIEGSGYFLDKIEREDFLRKQRTFDNGSIPHQIHLQEMRAIIRRQAEFYPFLADNQDRIEKILTFRIPYYVGPLARGKSDFAWLSRKSADKITPWNFDEIVDKESSVEAFINRMTNYDLYLPNQKVLPKHSLLYEKFTVYNELTKVKYKTEQGKTAFFDANMKQEIFDGVFKVYRKVTKDKLMDFLEKEFDEFRIVDLTGLDKENKAFNASYGTYHDLRKILDKDFLDNSKNEKILEDIVLTLTLFEDREMIRKRLENYSDLLTKEQVKKLERRHYTGWGRLSAELIHGIRNKESRKTLLDYLIDDGNSNRNFMQLINDDALSFKEEIAKAQVIGETDNLNQVVSDIAGSPAIKKGILQSLKIVDELVKIMGHQPENIVVEMARENQFTNQGRRNSQQRLKGLTDSIKEFGSQILKEHPVENSQLQNDRLFLYYLQNGRDMYTGEELDIDYLSQYDIDHIIPQAFIKDNSIDNRVLTSSKENRGKSDDVPSKDVVRKMKSYWSKLLSAKLITQRKFDNLTKAERGGLTDDDKAGFIKRQLVETRQITKHVARILDERFNTETDENNKKIRQVKIVTLKSNLVSNFRKEFELYKVREINDYHHAHDAYLNAVIGKALLGVYPQLEPEFVYGDYPHFHGHKENKATAKKFFYSNIMNFFKKDDVRTDKNGEIIWKKDEYISNIKKVLSYPQVNIVKKVEEQTGGFSKESILPKGNSDKLIPRKTKKFYWDTKKYGGFDSPIVAYSILVIADIEKGKSKKLKTVKALVGVTIMEKMTFERDPIAFLERKGYRNVQEENIIKLPKYSLFKLENGRKRLLASARELQKGNEIVLPNHLGTLLYHAKNIHKVDEPKHLDYVDKHKDEFKELLDVVSNFSKKYTLAEGNLEKIKELYAQNNGEDLKELASSFINLLTFTAIGAPATFKFFDKNIDRKRYTSTTEILNATLIHQSITGLYETRIDLSKLGGD

SEQ ID NO: 152 - protein, 1345 aa, Streptococcus mutans
MKKPYSIGLDIGTNSVGWAVVTDDYKVPAKKMKVLGNTDKSHIKKNLLGALLFDSGNTAEDRRLKRTARRRYTRRRNRILYLQEIFSEEMGKVDDSFFHRLEDSFLVTEDKRGERHPIFGNLEEEVKYHENFPTIYHLRQYLADNPEKTDLRLVYLALAHIIKFRGHFLIEGKFDTRNNDVQRLFQEFLAVYDNTFENSSLQEQNVQVEEILTDKISKSAKKDRVLKLFPNEKSNGRFAEFLKLIVGNQADFKKHFELEEKAPLQFSKDIYEEELEVLLAQIGDNYAELFLSAKKLYDSILLSGILTVTDVSTKAPLSASMIQRYNEHQMDLAQLKQFIRQKLSDKYNEVFSDVSKDGYAGYIDGKTNQEAFYKYLKGLLNKIEGSGYFLDKIEREDFLRKQRTFDNGSIPHQIHLQEMRAIIRRQAEFYPFLADNQDRIEKILTFRIPYYVGPLARGKSDFAWLSRKSADKITPWNFDEIVDKESSAEAFINRMTNYDLYLPNQKVLPKHSLLYEKFTVYNELTKVKYKTEQGKTAFFDANMKQEIFDGVFKVYRKVTKDKLMDFLEKEFDEFRIVDLTGLDKENKAFNASYGTYHDLRKILDKDFLDNSKNEKILEDIVLTLTLFEDREMIRKRLKNYSDLLTKEQLKKLERRHYTGWGRLSAELIHGIRNKESRKTILDYLIDDGNSNRNFMQLINDDALSFKEEIAKAQVIGETDNLNQVVSDIAGSLAIKKGILQSLKIVDELVKIMGHQPENIVVEMARENQFTNQGRRNSQQRLKGLTDSIKEFGSQILKEHPVENSQLQNDRLFLYYLQNGRDMYTGEELDIDYLSQYDIDHIIPQAFIKDNSIDNRVLTSSKENRGKSDDVPSKDVVRKMKSYWSKLLSAKLITQRKFDNLTKGERGGLTDDDKAGFIKHQLVETRQITKHVARILDERFNTETDENNKKIRQVKIVTLKSNLVSNFRKEFELYKVREINDYHHAHDAYLNAVIGKALLGVYPQLEPEFVYGDYPHFHGHKENKATAKKFFYSNIMNFFKKDDVRTDKNGEIIWKKDEYISNIKKVLSYPQVNIVKKVEEQTGGFFKESILPKGDSDKLIPRKTKKFYWDTKKYGGFDSPIVAYSILVIADIEKGKSKKLKTVKALVGVTIMEKMTFERDPVAFLERKGYRNVQEENIIKLPKYSLFKLENGRKRLLASARELQKGNEIVLPNHLGTLLYHAKNIHKVDEPKHLDYVDKHKDEFKELLDVVSNFSKKYTLAEGNLEKIKELYAQNNGEDLKELASSFINLLTFTAIGAPATFKFFDKNIDRKRYTSTTEILNATLIHQSITGLYETRIDLSKLGGD

SEQ ID NO: 153 - protein, 1345 aa, Streptococcus mutans
MKKPYSIGLDIGTNSVGWAVVTDDYKVPAKKMKVLGNTDKSHIKKNLLGALLFDSGNTAEDRRLKRTARRRYTRRRNRILYLQEIFSEEMGKVDDSFFHRLEDSFLVTEDKRGERHPIFGNLEEEVKYHENFPTIYHLRQYLADNPEKTDLRLVYLALAHIIKFRGHFLIEGKFDTRNNDVQRLFQEFLAVYDNTFENSSLQEQNVQVEEILTDKISKSAKKDRVLKLFPNEKSNGRFAEFLKLIVGNQADFKKHFELEEKAPLQFSKDIYEEELEVLLAQIGDNYAELFLSAKKLYDSILLSGILTVTDVSTKAPLSASMIQRYNEHQMDLAQLKQFIRQKLSDKYNEVFSDVSKDGYAGYIDGKTNQEAFYKYLKGLLNKIEGSGYFLDKIEREDFLRKQRTFDNGSIPHQIHLQEMRAIIRRQAEFYPFLADNQDRIEKILTFRIPYYVGPLARGKSDFAWLSRKSADKITPWNFDEIVDKESSAEAFINRMTNYDLYLPNQKVLPKHSLLYEKFTVYNELTKVKYKTEQGKTAFFDANMKQEIFDGVFKVYRKVTKDKLMDFLEKEFDEFRIVDLTGLDKENKAFNASYGTYHDLRKILDKDFLDNSKNEKILEDIVLTLTLFEDREMIRKRLENYSDLLTKEQVKKLERRHYTGWGRLSAELIHGIRNKESRKTLLDYLIDDGNSNRNFMQLINDDALSFKEEIAKAQVIGETDNLNQVVSDIAGSPAIKKGILQSLKIVDELVKIMGHQPENIVVEMARENQFTNQGQRNSQQRLKGLTDSIKEFGSQILKEHPVENSQLQNDRLFLYYLQNGRDMYTGEELDIDYLSQYDIDHIIPQAFIKDNSIDNRVLTSSKENRGKSDDVPSKDVVRKMKSYWSKLLSAKLITQRKFDNLTKAERGGLTDDDKAGFIKRQLVETRQITKHVARILDERFNTETDENNKKIRQVKIVTLKSNLVSNFRKEFELYKVREINDYHHAHDAYLNAVIGKALLGVYPQLEPEFVYGDYPHFHGHKENKATAKKFFYSNIMNFFKKDDVRTDKNGEIIWKKDEYISNIKKVLSYPQVNIVKKVEEQTGGFSKESILPKGDSDKLIPRKTKKFYWDTKKYGGFDSPIVAYSILVIADIEKGKSKKLKTVKALVGVTIMEKMTFERDPVAFLERKGYRNVQEENIIKLPKYSLFKLENGRKRLLASARELQKGNEIVLPDHLGTLLYHAKNIHKVDEPKHLDYVDKHKDEFKELLDVVSNFSKKYTLAEGNLEKIKELYAQNNGEDLKELASSFINLLTFTAIGAPATFKFFDKNIDRKRYTSTTEILNATLIHQSITGLYETRIDLSKLGGD

SEQ ID NO: 154 - protein, 1345 aa, Streptococcus mutans
MKKPYSIGLDIGTNSVGWAVVTDDYKVPAKKMKVLGNTDKSHIKKNLLGALLFDSGNTAADRRLKRTARRRYTRRRNRILYLQEIFAEEMSKVDDSFFHRLEDSFLVTEDKRGERHPIFGNLEEEVKYHENFPTIYHLRQYLADNPEKVDLRLVYLALAHIIKFRGHFLIEGKFDTRNNDVQRLFQEFLAVYDNTFENSSLQEQNVQVEEILTDKISKSAKKDRVLKLFPNEKSNGRFAEFLKLIVGNQADFKKHFELEEKAPLQFSKDTYEEELEVLLAQIGDNYAELFLSAKKLYDSILLSGILTVTDVSTKAPLSASMIQRYNEHQMDLAQLKQFIRQKLSDKYNEVFSDVSKDGYAGYIDGKTNQEAFYKYLKGLLNKIEGSGYFLDKIEREDFLRKQRTFDNGSIPHQIHLQEMRAIIRRQAEFYPFLADNQDRIEKILTFRIPYYVGPLARGKSDFAWLSRKSADKITPWNFDEIVDKESSAEAFINRMTNYDLYLPNQKVLPKHSLLYEKFTVYNELTKVKYKTEQGKTAFFDANMKQEIFDGVFKVYRKVTKDKLMDFLEKEFDEFRIVDLTGLDKENKAFNASYGTYHDLRKILDKDFLDNSKNEKILEDIVLTLTLFEDREMIRKRLENYSDLLTKEQVKKLERRHYTGWGRLSAELIHGIRNKESRKTILDYLIDDGNSNRNFMQLINDDALSFKEEIAKAQVIGETDNLNQVVSDIAGSPAIKKGILQSLKIVDELVKIMGHQPENIVVEMARENQFTNQGRRNSQQRLKGLTDSIKEFGSQILKEHPVKHSQLQNDRLFLYYLQNGRDMYTGEELDIDYLSQYDIDHIIPQAFIKDNSIDNRVLTSSKENRGKSDDVPSKNVVRKMKSYWSKLLSAKLITQRKFDNLTKAERGGLTDDDKAGFIKRQLVETRQITKHVARILDERFHTETDENNKKIRQVKIVTLKSNLVSNFRKEFELYKVREINDYHHAHDAYLNAVIGKALLGVYPQLEPEFVYGDYPHFHGHKENKATAKKFFYSNIMNFFKKDDVRTDKNGEIIWKKDEHISNIKKVLSYPQVNIVKKVEEQTGGFSKESILPKGNSDKLIPRKTKKFYWDTKKYGGFDSPIVAYSILVIADIEKGKSKKLKTVKALVGVTIMEKMTFERDPVAFLERKGYRNVQEENIIKLPKYSLFKLENGRKRLLASARELQKGNEIVLPNHLGTLLYHAKNIHKVDEPKHLDYVDKHKDEFKELLDVVSNFSKKYTLAEGNLEKIKELYAQNNGEDLKELASSFINLLTFTAIGAPATFKFFDKNIDRKRYTSTTEILNATLIHQSITGLYETRIDLSKLGGD

SEQ ID NO: 155 - protein, 1345 aa, Streptococcus mutans
MKKPYSIGLDIGTNSVGWAVVTDDYKVPDKKMKVLGNTDKSHIKKNLLGALLFDSGNTAEDRRLKRTARRRYTRRRNRILYLQEIFSEEMGKVDDSFFHRLEDSFLVTEDKRGERHPIFGNLEEEVKYHENFPTIYHLRQYLADNPEKTDLRLVYLALAHIIKFRGHFLIEGKFDTRNNDVQRLFQEFLAVYDNTFENSSLQEQNVQVEEILTDKISKSAKKDRVLKLFPNEKSNGRFAEFLKLIVGNQADFKKHFELEEKAPLQFSKDIYEEELEVLLAQIGDNYAELFLSAKKLYDSILLSGILTVTDVSTKAPLSASMIQRYNEHQMDLAQLKQFIRQKLSDKYNEVFSDVSKDGYAGYIDGKTNQEAFYKYLKGLLNKIEGSGYFLDKIEREDFLRKQRTFDNGSIPHQIHLQEMRAIIRRQAEFYPFLADNQDRIEKILTFRIPYYVGPLARGKSDFAWLSRKSADKITPWNFDEIVDKESSVEAFINRMTNYDLYLPNQKVLPKHSLLYEKFTVYNELTKVKYKTEQGKTAFFDANMKQEIFDGVFKVYRKVTKDKLMDFLEKEFDEFRIVDLTGLDKENKAFNASYGTYHDLRKILDKDFLDNSKNEKILEDIVLTLTLFEDREMIRKRLKNYSDLLTKEQLKKLERRHYTGWGRLSAELIHGIRNKESRKTILDYLIDDGNSNRNFMQLINDDALSFKEEIAKAQVIGETDNLNQVVSDIAGSPAIKKGILQSLKIVDELVKIMGHQPENIVVEMARENQFTNQGRRNSQQRLKGLTDSIKEFGSQILKEHPVENSQLQNDRLFLYYLQNGRDMYTGEELDIDYLSQYDIDHIIPQAFIKDNSIDNRVLTSSKENRGKSDDVPSKDVVRKMKSYWSKLLSAKLITQRKFDNLTKAERGGLTDDDKAGFIKRQLVETRQITKHVARILDERFYTETDENNKKIRQVKIVTLKSNLVSNFRKEFELYKVREINDYHHAHDAYLNAVIGKALLGVYPQLEPEFVYGDYPHFHGHKENKATAKKFFYSNIMNFFKKDDVRTDKNGEIIWKKDEHISNIKKVLSYPQVNIVKKVEEQTGGFSKESILPKGNSDKLIPRKTKKFYWDTKKYGGFDSPIVAYSILVIADIEKGKSKKLKTVKALVGVTIMEKMTFERDPVAFLERKGYRNVQEENIIKLPKYSLFKLENGRKRLLASARELQKGNEIVLPNHLGTLLYHAKNIHKVDEPKHLDYVDKHKDEFKELLDVVSNFSKKYTLAEGNLEKIKELYAQNNGEDLKELASSFINLLTFTAIGAPATFKFFDKNIDRKRYTSTTEILNATLIHQSITGLYETRIDLSKLGGD

SEQ ID NO: 156 - protein, 1345 aa, Streptococcus mutans
MKKPYSIGLDIGTNSVGWAVVTDDYKVPAKKMKVLGNTDKSHIKKNLLGALLFDSGNTAADRRLKRTARRRYTRRRNRILYLQEIFAEEMSKVDDSFFHRLEDSFLVTEDKRGERHPIFGNLEEEVKYHENFPTIYHLRQYLADNPEKVDLRLVYLALAHIIKFRGHFLIEGKFDTRNNDVQRLFQEFLAVYDNTFENSSLQEQNVQVEEILTDKISKSAKKDRVLKLFPNEKSNGRFAEFLKLIVGNQADFKKHFELEEKAPLQFSKDTYEEELEVLLAQIGDNYAELFLSAKKLYDSILLSGILTVTDVSTKAPLSASMIQRYNEHQMDLAQLKQFIRQKLSDKYNEVFSDVSKDGYAGYIDGKTNQEAFYKYLKGLLNKIEGSGYFLDKIEREDFLRKQRTFDNGSIPHQIHLQEMRAIIRRQAEFYPFLADNQDRIEKILTFRIPYYVGPLARGKSDFAWLSRKSADKITPWNFDEIVDKESSAEAFINRMTNYDLYLPNQKVLPKHSLLYEKFTVYNELTKVKYKTEQGKTAFFDANMKQEIFDGVFKVYRKVTKDKLMDFLEKEFDEFRIVDLTGLDKENKAFNASYGTYHDLRKILDKDFLDNSKNEKILEDIVLTLTLFEDREMIRKRLENYSDLLTKEQVKKLERRHYTGWGRLSAELIHGIRNKESRKTILDYLIDDGNSNRNFMQLINDDALSFKEEIAKAQVIGETDNLNQVVSDIAGSPAIKKGILQSLKIVDELVKIMGHQPENIVVEMARENQFTNQGRRNSQQRLKGLTDSIKEFGSQILKEHPVENSQLQNDRLFLYYLQNGRDMYTGEELDIDYLSQYDIDHIIPQAFIKDNSIDNRVLTSSKENRGKSDDVPSKNVVRKMKSYWSKLLSAKLITQRKFDNLTKAERGGLTDDDKAGFIKRQLVETRQITKHVARILDERFHTETDENNKKIRQVKIVTLKSNLVSNFRKEFELYKVREINDYHHAHDAYLNAVIGKALLGVYPQLEPEFVYGDYPHFHGHKENKATAKKFFYSNIMNFFKKDDVRTDKNGEIIWKKDEHISNIKKVLSYPQVNIVKKVEEQTGGFSKESILPKGNSDKLIPRKTKKFYWDTKKYGGFDSPIVAYSILVIADIEKGKSKKLKTVKALVGVTIMEKMTFERDPVAFLERKGYRNVQEENIIKLPKYSLFKLENGRKRLLASARELQKGNEIVLPNHLGTLLYHAKNIHKVDEPKHLDYVDKHKDEFKELLDVVSNFSKKYTLAEGNLEKIKELYAQNNGEDLKELASSFINLLTFTAIGAPATFKFFDKNIDRKRYTSTTEILNATLIHQSITGLYETRIDLSKLGGD

SEQ ID NO: 157 - protein, 1345 aa, Streptococcus mutans
MKKPYSIGLDIGTNSVGWAVVTDDYKVPAKKMKVLGNTDKSHIEKNLLGALLFDSGNTAEDRRLKRTARRRYTRRRNRILYLQEIFSEEMGKVDDSFFHRLEDSFLVTEDKRGERHPIFGNLEEEVKYHENFPTIYHLRQYLADNPEKVDLRLVYLALAHIIKFRGHFLIEGKFDTRNNDVQRLFQEFLAVYDNTFENSSLQEQNVQVEEILTDKISKSAKKDRVLKLFPNEKSNGRFAEFLKLIIGNQADFKKHFELEEKAPLQFSKDTYEEELEVLLAQIGDNYAELFLSAKKLYDSILLSGILTVTDVGTQAPLSASMIQRYNEHQMDLAQLKQFIRQKLSDKYNEVFSDVSKDGYAGYIDGKTNQEAFYKYLKGLLNKIEGSGYFLDKIEREDFLRKQRTFDNGSIPHQIHLQEMRAIIRRQAEFYPFLADNQDRIEKLLTFRIPYYVGPLARGKSDFAWLSRKSADKITPWNFDEIVDKESSAEAFINRMTNYDLYLPNQKVLPKHSLLYEKFTVYNELTKVKYKTEQGKTAFFDANMKQEIFDGVFKVYRKVTKDKLMDFLEKEFDEFRIVDLTGLDKENKVFNASYGTYHDLCKILDKDFLDNSKNEKILEDIVLTLTLFEDREMIRKRLENYSDLLTKEQVKKLERRHYTGWGRLSAELIHGIRNKESRKTILDYLIDDGNSNRNFMQLINDDALSFKEEIAKAQVIGETDNLNQVVSDIAGSPAIKKGILQSLKIVDELVKIMGHQPENIVVEMARENQFTNQGRRNSQQRLKGLTDSIKEFGSQILKEHPVENSQLQNDRLFLYYLQNGRDMYTGEELDIDYLSQYDIDHIIPQAFIKDNSIDNRVLTSSKENRGKSDDVPSKDVVRKMKSYWSKLLSAKLITQRKFDNLTKAERGGLTDDDKAGFIKRQLVETRQITKHVARILDERFHTETDENNKKIRQVKIVTLKSNLVSNFRKEFELYKVREINDYHHAHDAYLNAVIGKALLGVYPQLEPEFVYGDYPHFHGHKENKATAKKFFYSNIMNFFKKDDVRTDKNGEIIWKKDEHISNIKKVLSYPQVNIVKKVEEQTGGFSKESILPKGNSDKLIPRKTKKFYWDTKKYGGFDSPIVAYSILVIADIEKGKSKKLKTVKALVGVTIMEKMTFERDPVAFLERKGYRNVQEENIIKLPKYSLFKLENGRKRLLASARELQKGNEIVLPNHLGTLLYHAKNIHKVDEPKHLDYVDKHKDEFKELLDVVSNFSKKYTLAEGNLEKIKELYAQNNGEDLKELASSFINLLTFTAIGAPATFKFFDKNIDRKRYTSTTEILNATLIHQSITGLYETRIDLNKLGGD

SEQ ID NO: 158 - protein, 1345 aa, Streptococcus mutans
MKKPYSIGLDIGTNSVGWAVVTDDYKVPAKKMKVLGNTDKSHIKKNLLGALLFDSGNTAEDRRLKRTARRRYTRRRNRILYLQEIFSEEMGKVDDSFFHRLEDSFLVTEDKRGERHPIFGNLEEEVKYHENFPTIYHLRQYLADNPEKVDLRLVYLALAHIIKFRGHFLIEGKFDTRNNDVQKLFQEFLAVYDNTFENSSLQEQNVQVEEILTDKISKSAKKDRVLKLFPNEKSNGRFAEFLKLIVGNQADFKKHFELEEKAPLQLSKDTYEEELEVLLAQIGDNYAELFLSAKKLYDSILLSGILTVTDVSTKAPLSASMIQRYNEHQMDLAQLKQFIRQKLSDKYNEVFSDVSKDGYAGYIDGKTNQEAFYKYLKGLLNKIEGSGYFLDKIEREDFLRKQRTFDNGSIPHQIHLQEMRAIIRRQAEFYPFLADNQDRIEKILTFRIPYYVGPLARGKSDFAWLSRKSADKITPWNFDEIVDKESSVEAFINRMTNYDLYLPNQKVLPKHSLLYEKFTVYNELTKVKYKTEQGKTAFFDANMKQEIFDGVFKVYRKVTKDKLMDFLEKEFDEFRIVDLTGLDKENKAFNASYGTYHDLRKILDKDFLDNSKNEKILEDIVLTLTLFEDREMIRKRLENYSDLLTKEQVKKLERRHYTGWGRLSAELIHGIRNKESRKTLLDYLIDDGNSNRNFMQLINDDALSFKEEIAKAQVIGETDNLNQVVSDIAGSPAIKKGILQSLKIVDELVKIMGHQPENIVVEMARENQFTNQGRRNSQQRLKGLTDSIKEFGSQILKEHPVENSQLQNDRLFLYYLQNGRDMYTGEELDIDYLSQYDIDHIIPQAFIKDNSIDNRVLTSSKENRGKSDDVPSKDVVRKMKSYWSKLLSAKLITQRKFDNLTKAERGGLTDDDKAGFIKRQLVETRQITKHVARILDERFNTETDENNKKIRQVKIVTLKSNLVSNFRKEFELYKVREINDYHHAHDAYLNAVIGKALLGVYPQLEPEFVYGDYPHFHGHKENKATAKKFFYSNIMNFFKKDDVRTDKNGEIIWKKDEYISNIKKVLSYPQVNIVKKVEEQTGGFSKESILPKGNSDKLIPRKTKKFYWDTKKYGGFDSPIVAYSILVIADIEKGKSKKLKTVKALVGVTIMEKMTFERDPIAFLERKGYRNVQEENIIKLPKYSLFKLENGRKRLLASARELQKGNEIVLPNHLGTLLYHAKNIHKVDEPKHLDYVDKHKDEFKELLDVVSNFSKKYTLAEGNLEKIKELYAQNNGEDLKELASSFINLLTFTAIGAPAAFKFFDKNIDRKRYTSTTEILNATLIHQSITGLYETRIDLSKLGGD

SEQ ID NO: 159 - protein, 1345 aa, Streptococcus mutans
MKKPYSIGLDIGTNSVGWAVVTDDYKVPAKKMKVLGNTDKSHIKKNLLGALLFDSGNTAEDRRLKRTARRRYTRRRNRILYLQEIFSEEMGKVDDSFFHRLEDSFLVTEDKRGECHPIFGNLEEEVKYHENFPTIYHLRQYLADNPEKTDLRLVYLALAHIIKFRGHFLIEGKFDTRNNDVQRLFQEFLAVYDNTFENSSLQEQNVQVEEILTDKISKSAKKDRVLKLFPNEKSNGRFAEFLKLIVGNQADFKKHFELEEKAPLQFSKDTYEEELEVLLAQIGDNYAELFLSAKKLYDSILLSGILTVTDVSTKAPLSASMIQRYNEHQMDLTQLKQFIRQKLSDKYNEVFSDVSKDGYAGYIDGKTNQEAFYKYLKGLLNKIEGNGYFLDKIEREDFLRKQRTFDNGSIPHQIHLQEMRAIIRRQAEFYPFLADNQDRIEKILTFRIPYYVGPLARGKSDFAWLSRKSADKITPWNFDEIVDKESSAEAFINRMTNYDLYLPNQKVLPKHSLLYEKFTVYNELTKVKYKTEQGKTAFFDANMKQEIFDGVFKVYRKVTKDKLMDFLEKEFDEFRIVDLTGLDKENKAFNASYGTYHDLRKILDKDFLDNSKNEKILEDIVLTLTLFEDREMIRKRLENYSDLLTKEQVKKLERRHYTGWGRLSAELIHGIRNKESRKTLLDYLIDDGNSNRNFMQLINDDALSFKEEIAKAQVIGETDNLNQVVSDIAGSPAIKKGILQSLKIVDELVKIMGHQPENIVVEMARENQFTNQGRRNSQQRLKGLTDSIKEFGSQILKEHPVENSQLQNDRLFLYYLQNGRDMYTGEELDIDYLSQYDIDHIIPQAFIKDNSIDNRVLTSSKENRGKSDDVPSKDVVRKMKPYWSKLLSAKLITQRKFDNLTKAERGGLTDDDKAGFIKRQLVETRQITKHVARILDERFNTETDENNKKIRQVKIVTLKSNLVSNFRKEFELYKVREINDYHHAHDAYLNAVIGKALLGVYPQLEPEFVYGDYPHFHGHEENKATAKKFFYSNIMNFFKKDDVRTDKNGEIIWKKDEHISNIKKVLSYPQVNIVKKVEEQTGGFSKESILPKGNSDKLIPRKTKKFYWDTKKYGGFDSPIVAYSILVIADIEKGKSKKLKTVKALVGVTIMEKMTFERDPVAFLERKGYRNVQEENIIKLPKYSLFKLENGRKRLLASARELQKGNEIVLPNHLGTLLYHAKNIHKVDEPKHLDYVDKHKDEFKELLDVVSNFSKKYTLAEGNLEKIKELYAQNNGEDLKELSSSFINLLTFTAIGAPAAFKFFDKNIDRKRYTSTTEILNATLIHQSITGLYETRIDLSKLGGD

SEQ ID NO: 160 - protein, 1345 aa, Streptococcus mutans
MKKPYSIGLDIGTNSVGWAVVTDDYKVPAKKMKVLGNTDKSHIEKNLLGALLFDSGNTAEDRRLKRTARRRYTRRRNRILYLQEIFSEEMGKVDDSFFHRLEDSFLVTEDKRGERHPIFGNLEEEVKYHENFPTIYHLRQYLADNPEKVDLRLVYLALAHIIKFRGHFLIEGKFDTRNNDVQRLFQEFLAVYDNTFENSSLQEQNVQVEEILTDKISKSAKKDRVLKLFPNEKSNGRFAEFLKLIVGNQADFKKHFELEEKVPLQFSKDTYEEELEVLLAQIGDNYAELFLSAKKLYDSILLSGILTVTDVGTKAPLSASMIQRYNEHQMDLAQLKQFIRQKLSDKYNEVFSDVSKDGYAGYIDGKTNQEAFYKYLKGLLNKIEGSGYFLDKIEREDFLRKQRTFDNGSIPHQIHLQEMRAIIRRQAEFYPFLADNQDRIEKLLTFRIPYYVGPLARGKSDFAWLSRKSADKITPWNFDEIVDKESSAEAFINRMTNYDLYLPNQKVLPKHSLLYEKFTVYNELTKVKYKTEQGKTAFFDANMKQEIFDGVFKVYRKVTKDKLMDFLEKEFDEFRIVDLTGLDKENKVFNASYGTYHDLCKILDKDFLDNSKNEKILEDIVLTLTLFEDREMIRKRLENYSDLLTKEQVKKLERRHYTGWGRLSAELIHGIRNKESRKTILDYLIDDGNSNRNFMQLINDDALSFKEEIAKAQVIGETDNLNQVVSDIAGSPAIKKGILQSLKIVDELVKIMGHQPENIVVEMARENQFTNQGRRNSQQRLKGLTDSIKEFGSQILKEHPVENSQLQNDRLFLYYLQNGRDMYTGEELDIDYLSQYDIDHIIPQAFIKDNSIDNRVLTSSKENRGKSDDVPSKDVVRKMKSYWSKLLSAKLITQRKFDNLTKAERGGLTDDDKAGFIKRQLVETRQITKHVARILDERFNTETDENNKKIRQVKIVTLKSNLVSNFRKEFELYKVREINDYHHAHDAYLNAVIGKALLGVYPQLEPEFVYGDYPHFHGHKENKATAKKFFYSNIMNFFKKDDVRTDKNGEIIWKKDEHISNIKKVLSYPQVNIVKKVEEQTGGFSKESILPKGNSDKLIPRKTKKFYWDTKKYGGFDSPIVAYSILVIADIEKGKSKKLKTVKALVGVTIMEKMTFERDPVAFLERKGYRNVQEENIIKLPKYSLFKLENGRKRLLASARELQKGNEIVLPNHLGTLLYHAKNIHKVDEPKHLDYVDKHKDEFKELLDVVSNFSKKYTLAEGNLEKIKELYAQNNGEDLKELASSFINLLTFTAIGAPATFKFFDKNIDRKRYTSTTEILNATLIHQSITGLYETRIDLNKLGGD

SEQ ID NO: 161 - protein, 1345 aa, Streptococcus mutans
MKKPYSIGLDIGTNSVGWAVVTDDYKVPAKKMKVLGNTDKSHIKKNLLGALLFDSGNTAEDRRLKRTARRRYTRRRNRILYLQEIFSEEMGKVDDSFFHRLEDSFLVTEDKRGERHPIFGNLEEEVKYHENFPTIYHLRQYLADNPEKTDLRLVYLALAHIIKFRGHFLIEGKFDTRNNDVQRLFQEFLAVYDNTFENSSLQEQNVQVEEILTDKISKSAKKDRVLKLFPNEKSNGRFAEFLKLIVGNQADFKKHFELEEKAPLQFSKDIYEEELEVLLAQIGDNYAELFLSAKKLYDSILLSGILTVTDVSTKAPLSASMIQRYNEHQMDLAQLKQFIRQKLSDKYNEVFSDVSKDGYAGYIDGKTNQEAFYKYLKGLLNKIEGSGYFLDKIEREDFLRKQRTFDNGSIPHQIHLQEMRAIIRRQAEFYPFLADNQDRIEKILTFRIPYYVGPLARGKSDFAWLSRKSADKITPWNFDEIVDKESSAEAFINRMTNYDLYLPNQKVLPKHSLLYEKFTVYNELTKVKYKTEQGKTAFFDANMKQEIFDGVFKVYRKVTKDKLMDFLEKEFDEFRIVDLTGLDKENKAFNASYGTYHDLRKILDKDFLDNSKNEKILEDIVLTLTLFEDREMIRKRLKNYSDLLTKEQLKKLERRHYTGWGRLSAELIHGIRNKESRKTILDYLIDDGNSNRNFMQLINDDALSFKEEIAKAQVIGETDNLNQVVSDIAGSLAIKKGILQNLKIVDELVKIMGHQPENIVVEMARENQFTNQGRRNSQQRLKGLTDSIKEFGSQILKEHPVENSQLQNDRLFLYYLQNGRDMYTGEELDIDYLSQYDIDHIIPQAFIKDNSIDNRVLTSSKENRGKSDDVPSKDVVRKMKSYWSKLLSAKLITQRKFDNLTKGERGGLTDDDKAGFIKRQLVETRQITKHVARILDERFNTETDENNKKIRQVKIVTLKSNLVSNFRKEFELYKVREINDYHHAHDAYLNAVIGKALLGVYPQLEPEFVYGDYPHFHGHKENKATAKKFFYSNIMNFFKKDDVRTDKNGEIIWKKDEYISNIKKVLSYPQVNIVKKVEEQTGGFFKESILPKGDSDKLIPRKTKKFYWDTKKYGGFDSPIVAYSILVIADIEKGKSKKLKTVKALVGVTIMEKMTFERDPVAFLERKGYRNVQEENIIKLPKYSLFKLENGRKRLLASARELQKGNEIVLPNHLGTLLYHAKNIHKVDEPKHLDYVDKHKDEFKELLDVVSNFSKKYTLAEGNLEKIKELYAQNNGEDLKELASSFINLLTFTAIGAPATFKFFDKNIDRKRYTSTTEILNATLIHQSITGLYETRIDLSKLGGD

SEQ ID NO: 162 - protein, 1345 aa, Streptococcus mutans
MKKPYSIGLDIGTNSVGWAVVTDDYKVPAKKMKVLGNTDKSHIEKNLLGALLFDSGNTAEDRRLKRTARRRYTRRRNRILYLQEIFSEEMGKVDDSFFHRLEDSFLVTEDKRGERHPIFGNLEEEVKYHENFPTIYHLRQYLADNPEKVDLRLVYLALAHIIKFRGHFLIEGKFDTRNNDVQRLFQEFLAVYDNTFENSSLQEQNVQVEEILTDKISKSAKKDRVLKLFPNEKSNGRFAEFLKLIVGNQADFKKHFELEEKAPLQFSKDTYEEELEVLLAQIGDNYAELFLSAKKLYDSILLSGILTVTDVGTKAPLSASMIQRYNEHQMDLAQLKQFIRQKLSDKYNEVFSDVSKDGYAGYIDGKTNQEAFYKYLKGLLNKIEGSGYFLDKIEREDFLRKQRTFDNGSIPHQIHLQEMRAIIRRQAEFYPFLADNQDRIEKLLTFRIPYYVGPLARGKSDFAWLSRKSADKITPWNFDEIVDKESSAEAFINRMTNYDLYLPNQKVLPKHSLLYEKFTVYNELTKVKYKTEQGKTAFFDANMKQEIFDGVFKVYRKVTKDKLMDFLEKEFDEFRIVDLTGLDKENKVFNASYGTYHDLCKILDKDFLDNSKNEKILEDIVLTLTLFEDREMIRKRLENYSDLLTKEQVKKLERRHYTGWGRLSAELIHGIRNKESRKTILDYLIDDGNSNRNFMQLINDDALSFKEEIAKAQVIGETDNLNQVVSDIAGSPAIKKGILQSLKIVDELVKIMGHQPENIVVEMARENQFTNQGRRNSQQRLKGLTDSIKEFGSQILKEHPVENSQLQNDRLFLYYLQNGRDMYTGEELDIDYLSQYDIDHIIPQAFIKDNSIDNRVLTSSKENRGKSDDVPSKDVVRKMKSYWSKLLSAKLITQRKFDNLTKAERGGLTDDDKAGFIKRQLVETRQITKHVARILDERFNTETDENNKKIRQVKIVTLKSNLVSNFRKEFELYKVREINDYHHAHDAYLNAVIGKALLGVYPQLEPEFVYGDYPHFHGHKENKATAKKFFYSNIMNFFKKDDVRTDKNGEIIWKKDEHISNIKKVLSYPQVNIVKKVEEQTGGFSKESILPKGNSDKLIPRKTKKFYWDTKKYGGFDSPIVAYSILVIADIEKSKSKKLKTVKALVGVTIMEKMTFERDPVAFLERKGYRNVQEENIIKLPKYSLFKLENGRKRLLASARELQKGNEIVLPNHLGTLLYHAKNIHKVDEPKHLDYVDKHKDEFKELLDVVSNFSKKYTLAEGNLEKIKELYAQNNGEDLKELASSFINLLTFTAIGAPATFKFFDKNIDRKRYTSTTEILNATLIHQSITGLYETRIDLNKLGGD

SEQ ID NO: 163 - protein, 1336 aa, Streptococcus mutans
MKKPYSIGLDIGTNSVGWAVVTDDYKVPAKKMKVLGNTDKSHIKKNLLGALLFDSGNTAEDRRLKRTARRRYTRRRNRILYLQEIFAEEMSKVDDSFFHRLDESFLTDDDKNFDSHPIFGNKAEEDAYHQKFPTIYHLRKHLADSTEKADLRLVYLALAHMIKFRGHFLIEGELNAENTDVQKLFADFVGVYDRTFDDSHLSEITVDASSILTEKISKSRRLEKLINNYPKEKKNTLFGNLIALSLGLQPNFKTNFKLSEDAKLQFSKDTYEEDLEELLGKIGDDYADLFTLAKNLYDAILLSGILTADDSSTKAPLSASMIKRYAEHHEDLEKLKEFIKANKPELYHDIFKDETKNGYAGYIENGVKQDEFYKYLKNTLSKITGSDYFLDQIEREDFLRKQRTFDNGSIPHQIHLQEMHAILRRQGDYYPFLKENQDRIEKILTFRIPYYVGPLARKNSRFAWAEYHSDEAVTPWNFDQVIDKESSAQAFIEHMTNNDLYLPNEKVLPKHSPLYEKYTVYNELTKIKYVTEIGEAKFFDANLKQEIFDGLFKHERKVTKKKLRTFLDKNFDEFRIVDIQGLDKETETFNASYATYQDLLKVIKDKVFMDNPENAEILENIVLTLTLFEDREMIKQRLAKYADVFDKKVIDQLARRHYTGWGRLSAKLLNGIRDKQSCKTIMDYLIDDAQSNRNLMQLITDDNLTFKDDIVKAQYVDNSDDLHQVVQSLAGSPAIKKGILQSLKIVDELVKVMGKEPEQIVVEMARENQTTAKGRRNSQQRYKRLKEAIKDLNHKILKEHPTDNQALQNNRLFLYYLQNGRDMYTGESLDINRLSDYDIDHVIPQAFIKDNSIDNRVLTSSKANRGKSDDVPSEDVVNRMRPFWNKLLSSGLISQRKYNNLTKKELTLDDKAGFIKRQLVETRQITKHVARMLDERFNKEFDDNNKRIRRVKIVTLKSNLVSSFRKEFELYKVREINDYHHAHDAYLNAVVVKALLVKYPKLEPEFVYGEYLKYNSYRERKATQKMFFYSNIMNMFKSKVKLADDQIVERPMIEVNDETGEIAWDKTKHITTVKKVLSYPQVNIVKKVEEQTGGLFDPKSPLEKLVPLKKALNPEKYGGYQKPTTAYPILLIVDTKQLIPISVMDKKRFEQNPVKFLKDKGYQQIEKNNFVKLPKYTLVDIGNGIKRLWASSKEVHKGNQLVVSKKSQDLLYHAHHLDNDYSNEYVKNHYQQFDILFNEITSFSKKCKLGKEHIQKIEEAYSKERDFASIEELADGFIKLLGFTQLGATSPFSFLGIKLNQKQYTGKKDYLEATLIHQSITGLYETRIDLSKLGGD

SEQ ID NO: 164 - protein, 1345 aa, Streptococcus mutans
MKKPYSIGLDIGTNSVGWAVVTDDYKVPAKKMKVLGNTDKSHIKKNLLGALLFDSGNTAADRRLKRTARRRYTRRRNRILYLQEIFAEEMSKVDDSFFHRLEDSFLVTEDKRGERHPIFGNLEEEVKYHENFPTIYHLRQYLADNPEKVDLRLVYLALAHIIKFRGHFLIEGKFDTRNNDVQRLFQEFLAVYDNTFENSSLQEQNVQVEEILTDKISKSAKKDRVLKLFPNEKSNGRFAEFLKLIVGNQADFKKHFELEEKAPLQFSKDTYEEELEVLLAQIGDNYAELFLSAKKLYDSILLSGILTVTDVSTKAPLSASMIQRYNEHQMDLVQLKQFIRQKLSDKYNEVFSDVSKDGYAGYIDGKTNQEAFYKYLKGLLNKIEGSGYFLDKIEREDFLRKQRTFDNGSIPHQIHLQEMRAIIRRQAEFYPFLADNQDRIEKILTFRIPYYVGPLARGKSDFAWLSRKSADKITPWNFDEIVDKESSAEAFINRMTNYDLYLPNQKVLPKHSLLYEKFTVYNELTKVKYKTEQGKTAFFDANMKQEIFDGVFKVYRKVTKDKLMDFLEKEFDEFRIVDLTGLDKENKAFNASYGTYHDLRKILDKDFLDNSKNEKILEDIVLTLTLFEDREMIRKRLENYSDLLTKEQVKKLERRHYTGWGRLSAELIHGIRNKESRKTILDYLIDDGNSNRNFMQLINDDALSFKEEIAKAQVIGETDNLNQVVSDIAGSPAIKKGILQSLKIVDELVKIMGHQPENIVVEMARENQFTNQGRRNSQQRLKGLTDSIKEFGSQILKEHPVEHSQLQNDRLFLYYLQNGRDMYTGEELDIDYLSQYDIDHIIPQAFIKDNSIDNRVLTSSKENRGKSDDVPSKNVVRKMKSYWSKLLSAKLITQRKFDNLTKAERGGLTDDDKAGFIKRQLVETRQITKHVARILDERFHTETDENNKKIRQVKIVTLKSNLVSNFRKEFELYKVREINDYHHAHDAYLNAVIGKALLGVYPQLEPEFVYGDYPHFHGHKENKATAKKFFYSNIMNFFKKDDVRTDKNGEIIWKKDEHISNIKKVLSYPQVNIVKKVEEQTGGFSKESILPKGNSDKLIPRKTKKFYWDTKKYGGFDSPIVAYSILVIADIEKGKSKKLKTVKALVGVTIMEKMTFERDPVAFLERKGYRNVQEENIIKLPKYSLFKLENGRKRLLASARELQKGNEIVLPNHLGTLLYHAKNIHKVDEPKHLDYVDKHKDEFKELLDVVSNFSKKYTLAEGNLEKIKELYAQNNGEDLKELASSFINLLTFTAIGAPATFKFFDKNIDRKRYTSTTEILNATLIHQSITGLYETRIDLSKLGGD

SEQ ID NO: 165 - protein, 1345 aa, Streptococcus mutans
MKKPYSIGLDIGTNSVGWAVVTDDYKVPAKKMKVLGNTDKSHIKKNLLGALLFDSGNTAEDRRLKRTTRRRYTRRRNRILYLQEIFSEEMGKVDDSFFHRLEDSFLVTEDKRGERHPIFGNLEEEVKYHENFPTIYHLRQYLADNPEKTDLRLVYLALAHIIKFRGHFLIEGKFDTRNNDVQRLFQEFLAVYDNTFENSSLQEQNVQVEEILTDKISKSAKKDRVLKLFPNEKSNGRFAEFLKLIVGNQADFKKHFELEEKAPLQFSKDTYEEELEVLLAQIGDNYAELFLSAKKLYDSILLSGILTVTDVSTKAPLSASMIQRYNEHQMDLTQLKQFIRQKLSDKYNEVFSDVSKDGYAGYIDGKTNQEAFYKYLKGLLNKIEGSGYFLDKIEREDFLRKQRTFDNGSIPHQIHLQEMRAIIRRQAEFYPFLADNQDRIEKLLTFRIPYYVGPLASGKSDFAWLSRKSADKITPWNFDEIVDKESSAEAFINRMTNYDLYLPNQKVLPKHSLLYEKFTVYNELTKVKYKTEQGKTAFFDANMKQEIFDGVFKVYRKVTKDKLMDFLEKEFDEFRIVDLTGLDKENKVFNASYGTYHDLCKILDKDFLDNSKNEKILEDIVLTLTLFEDREMIRKRLENYSDLLTKEQVKKLERRHYTGWGRLSAELIHGIRNKESRKTILDYLIDDGNSNRNFMQLINDDALSFKEEIAKAQVIGETDNLNQVVSDIAGSPAIKKGILQSLKIVDELVKIMGHQPENIVVEMARENQFTNQGRRNSQQRLKGLTDSIKEFGSQILKEHPVENSQLQNDRLFLYYLQNGRDMYTGEELDIDYLSQYDIDHIIPQAFIKDNSIDNRVLTSSKENRGKSDDVPSKDVVRKMKSYWSKLLSAKLITQRKFDNLTKAERGGLTDDDKAGFIKRQLVETRQITKHVARILDERFNTETDENNKKIRQVKIVTLKSNLVSNFRKEFELYKVREINDYHHAHDAYLNAVIGKALLGVYPQLEPEFVYGDYPHFHGHKENKATAKKFFYSNIMNFFKKDDVRTDKNGEIIWKKDEHISNIKKVLSYPQVNIVKKVEEQTGGFSKESILPKGNSDKLIPRKTKKFYWDTKKYGGFDSPIVAYSILVIADIEKGKSKKLKTVKALVGVTIMEKMTFERDPVAFLERKGYRNVQEENIIKLPKYSLFKLENGRKRLLASARELQKGNEIVLPNHLGTLLYHAKNIHKVDEPKHLDYVDKHKDEFKELLDVVSNFSKKYTLAEGNLEKIKELYAQNNGEDLKELASSFINLLTFTAIGAPATFKFFDKNIDRKRYTSTTEILNATLIHQSITGLYETRIDLSKLGGD

SEQ ID NO: 166 - protein, 1336 aa, Streptococcus mutans
MKKPYSIGLDIGTNSVGWAVVTDDYKVPAKKMKVLGNTDKSHIKKNLLGALLFDSGNTAADRRLKRTARRRYTRRRNRILYLQEIFAEEMNKVDDSFFHRLDESFLTDDDKNFDSHPIFGNKAEEDAYHQKFPTIYHLRKHLADSTEKADLRLVYLALAHMIKFRGHFLIEGELNAENTDVQKLFADFVGVYDRTFDDSHLSEITVDASSILTEKISKSRRLEKLINNYPKEKKNTLFGNLIALSLGLQPNFKTNFKLSEDAKLQFSKDTYEEDLEELLGKIGDDYADLFTLAKNLYDAILLSGILTADDSSTKAPLSASMIKRYAEHHEDLEKLKEFIKANKPELYHDIFKDETKNGYAGYIENGVKQDEFYKYLKNTLSKIAGSDYFLDKIEREDFLRKQRTFDNGSIPHQIHLQEMHAILRRQGDYYPFLKENQDRIEKILTFRIPYYVGPLARKNSRFAWAEYHSDEAVTPWNFDQVIDKESSAQAFIEHMTNNDLYLPNEKVLPKHSPLYEKYTVYNELTKIKYVTEIGEAKFFDANLKQEIFDGLFKHERKVTKKKLRTFLDKNFDEFRIVDIQGLDKETETFNASYATYQDLLKVIKDKVFMDNPENAEILENIVLTLTLFEDREMIKQRLAKYADVFDKKVIDQLARRHYTGWGRLSAKLLNGIRDKQSCKTIMDYLIDDAQSNRNLMQLITDDNLTFKDDIVKAQYVDNSDDLHQVVQSLAGSPAIKKGILQSLKIVDELVKVMGKEPEQIVVEMARENQTTAKGRRNSQQRYKRLKEAIKDLNHKILKEHPTDNQALQNNRLFLYYLQNGRDMYTGESLDINRLSDYDIDHVIPQAFIKDNSIDNRVLTSSKANRGKSDDVPSEDVVNRMRPFWNKLLSSGLISQRKYNNLTKKELTLDDKAGFIKRQLVETRQITKHVARMLDERFNKEFDDNNKRIRRVKIVTLKSNLVSSFRKEFELYKVREINDYHHAHDAYLNAVVVKALLVKYPKLEPEFVYGEYPKYNSYRERKATQKMFFYSNIMNMFKSKVKLADDQIVERPMIEVNDETGEIAWDKTKHITTVKKVLSYPQVNIVKKVEEQTGGLFDPKSPLEKLVPLKKALNPEKYGGYQKPTTAYPILLIVDTKQLIPISVMDKKRFEQNPVKFLKDKGYQQIEKNNFVKLPKYTLVDIGNGIKRLWASSKEVHKGNQLVVSKKSQDLLYHAHHLDNDYSNEYVKNHYQQFDILFNEITSFSKKCKLGKEHIQKIEEAYSKERDSASIEELADGFIKLLGFTQLGATSPFSFLGIKLNQKQYTGKKDYLEATLIHQSITGLYETRIDLSKLGGD

SEQ ID NO: 167 - protein, 1345 aa, Streptococcus mutans
MKKPYSIGLDIGTNSVGWAVVTDDYKVPAKKMKVLGNTDKSHIKKNLLGALLFDSGNTAADRRLKRTARRRYTRRRNRILYLQEIFAEEMSKVDDSFFHRLEDSFLVTEDKRGERHPIFGNLEEEVKYYENFPTIYHLRQYLADNPEKVDLRLVYLALAHIIKFRGHFLIEGKFDTRNNDVQRLFQEFLAVYDNTFENSSLQEQNVQVEEILTDKISKSAKKDRVLKLFPNEKSNGRFAEFLKLIVGNQADFKKHFELEEKAPLQFSKDTYEEDLEELLGKIGDDYADLFTLAKNLYDAILLSGILTADDSSTKAPLSASMIQRYNEHQMDLAQLKQFIRQKLSDKYNEVFSDVSKDGYAGYIDGKTNQEAFYKYLKGLLNKIEGSGYFLDKIEREDFLRKQRTFDNGSIPHQIHLQEMRAIIRRQAEFYPFLADNQDRIEKILTFRIPYYVGPLARGKSDFAWLSRKSADKITPWNFDEIVDKESSAEAFINRMTNYDLYLPNQKVLPKHSLLYEKFTVYNELTKVKYKTEQGKTAFFDANMKQEIFDGVFKVYRKVTKDKLMDFLEKEFDEFRIVDLTGLDKENKVFNASYGTYHDLCKILDKDFLDNSKNEKILEDIVLTLTLFEDREMIRKRLENYSDLLTKEQVKKLERRHYTGWGRLSAELIHGIRNKESRKTILDYLIDDGNSNRNFMQLINDDALSFKEEIAKAQVIGETDNLNQVVSDIAGSPAIKKGILQSLKIVDELVKIMGHQPENIVVEMARENQFTNQGRRNSQQRLKGLTDSIKEFGSQILKEHPVENSQLQNDRLFLYYLQNGRDMYTGEELDIDYLSQYDIDHIIPQAFIKDNSIDNRVLTSSKENRGKSDDVPSKDVVRKMKPYWSKLLSAKLITQRKFDNLTKAERGGLTDDDKAGFIKRQLVETRQITKHVARILDERFNTETDENNKKIRQVKIVTLKSNLVSNFRKEFELYKVREINDYHHAHDAYLNAVIGKALLGVYPQLEPEFVYGDYPHFHGHEENKATAKKFFYSNIMNFFKKDDVRTDKNGEIIWKKDEHISNIKKVLSYPQVNIVKKVEEQTGGFSKESILPKGNSDKLIPRKTKKFYWDTKKYGGFDSPIVAYSILVIADIEKGKSKKLKTVKALVGVTIMEKMTFERDPVAFLERKGYRNVQEENIIKLPKYSLFKLENGRKRLLASARELQKGNEIVLPNHLGTLLYHAKNIHKVDEPKHLDYVDKHKDEFKELLDVVSNFSKKYTLAEGNLEKIKELYAQNNGEDLKELASSFINLLTFTAIGAPATFKFFDKNIDRKRYTSTTEILNATLIHQSITGLYETRIDLSKLGGD

SEQ ID NO: 168 - protein, 1345 aa, Streptococcus mutans
MKKPYSIGLDIGTNSVGWAVVTDDYKVPAKKMKVLGNTDKSHIKKNLLGALLFDSGNTAEDRRLKRTTRRRYTRRRNRILYLQEIFSEEMGKVDDSFFHRLEDSFLVTEDKRGERHPIFGNLEEEVKYHENFPTIYHLRQYLADNPEKTDLRLVYLALAHIIKFRGHFLIEGKFDTRNNDVQRLFQEFLAVYDNTFENSSLQEQNVQVEEILTDKISKSAKKDRVLKLFPNEKSNGRFAEFLKLIVGNQADFKKHFELEEKAPLQFSKDTYEEELEVLLAQIGDNYAELFLSAKKLYDSILLSGILTVTDVSTKAPLSASMIQRYNEHQMDLTQLKQFIRQKLSDKYNEVFSDVSKDGYAGYIDGKTNQEAFYKYLKGLLNKIEGSGYFLDKIEREDFLRKQRTFDNGSIPHQIHLQEMRAIIRRQAEFYPFLADNQDRIEKLLTFRIPYYVGPLASGKSDFAWLSRKSADKITPWNFDEIVDKESSAEAFINRMTNYDLYLPNQKVLPKHSLLYEKFTVYNELTKVKYKTEQGKTAFFDANMKQEIFDGVFKVYRKVTKDKLMDFLEKEFDEFRIVDLTGLDKENKVFNASYGTYHDLCKILDKDFLDNSKNEKILEDIVLTLTLFEDREMIRKRLENYSDLLTKEQVKKLERRHYTGWGRLSAELIHGIRNKESRKTILDYLIDDGNSNRNFMQLINDDALSFKEEIAKAQVIGETDNLNQVVSDIAGSPAIKKGILQSLKIVDELVKIMGHQPENIVVEMARENQFTNQGRRNSQQRLKGLTDSIKEFGSQILKEHPVENSQLQNDRLFLYYLQNGRDMYTGEELDIDYLSQYDIDHIIPQAFIKDNSIDNRVLTSSKENRGKSDDVPSKDVVRKMKSYWSKLLSAKLITQRKFDNLTKAERGGLTDDDKAGFIKRQLVETRQITKHVARILDERFNTETDENNKKIRQVKIVTLKSNLVSNFRKEFELYKVREINDYHHAHDAYLNAVIGKALLGVYPQLEPEFVYGDYPHFHGHKENKATAKKFFYSNIMNFFKKDDVRTDKNGEIIWKKDEHISNIKKVLSYPQVNIVKKVEEQTGGFSKESILPKGNSDKLIPRKTKKFYWDTKKYGGFDSPIVAYSILVIADIEKGKSKKLKTVKALVGVTIMEKMTFERDPVAFLERKGYRNVQEENIIKLPKYSLFKLENGRKRLLASARELQKGNEIVLPNHLGTLLYHAKNIHKVDEPKHLDYVDKHKDEFKELLDVVSNFSKKYTLAEGNLEKIKELYAQNNGEDLKELASSFINLLTFTAIGAPATFKFFDKNIDRKRYTSTTEILKATLIHQSITGLYETRIDLSKLGGD

SEQ ID NO: 169 - protein, 1338 aa, Streptococcus mutans NLML4
MDLIGTNSVGWAVVTDDYKVPAKKMKVLGNTDKSHIKKNLLGALLFDSGNTAADRRLKRTARRRYTRRRNRILYLQEIFAEEMSKVDDSFFHRLEDSFLVTEDKRGERHPIFGNLEEEVKYHENFPTIYHLRQYLADNPEKVDLRLVYLALAHIIKFRGHFLIEGKFDTRNNDVQRLFQEFLAVYDNTFENSSLQEQNVQVEEILTDKISKSAKKDRVLKLFPNEKSNGRFAEFLKLIVGNQADFKKHFELEEKAPLQFSKDTYEEELEVLLAQIGDNYAELFLSAKKLYDSILLSGILTVTDVSTKAPLSASMIQRYNEHQMDLAQLKQFIRQKLSDKYNEVFSDVSKDGYAGYIDGKTNQEAFYKYLKGLLNKIEGSGYFLDKIEREDFLRKQRTFDNGSIPHQIHLQEMRAIIRRQAEFYPFLADNQDRIEKILTFRIPYYVGPLARGKSDFAWLSRKSADKITPWNFDEIVDKESSAEAFINRMTNYDLYLPNQKVLPKHSLLYEKFTVYNELTKVKYKTEQGKTAFFDANMKQEIFDGVFKVYRKVTKDKLMDFLEKEFDEFRIVDLTGLDKENKAFNASYGTYHDLRKILDKDFLDNSKNEKILEDIVLTLTLFEDREMIRKRLENYSDLLTKEQVKKLERRHYTGWGRLSAELIHGIRNKESRKTILDYLIDDGNSNRNFMQLINDDALSFKEEIAKAQVIGETDNLNQVVSDIAGSPAIKKGILQSLKIVDELVKIMGHQPENIVVEMARENQFTNQGRRNSQQRLKGLTDSIKEFGSQILKEHPVEHSQLQNDRLFLYYLQNGRDMYTGEELDIDYLSQYDIDHIIPQAFIKDNSIDNRVLTSSKENRGKSDDVPSKNVVRKMKSYWSKLLSAKLITQRKFDNLTKAERGGLTDDDKAGFIKRQLVETRQITKHVARILDERFHTETDENNKKIRQVKIVTLKSNLVSNFRKEFELYKVREINDYHHAHDAYLNAVIGKALLGVYPQLEPEFVYGDYPHFHGHKENKATAKKFFYSNIMNFFKKDDVRTDKNGEIIWKKDEHISNIKKVLSYPQVNIVKKVEEQTGGFSKESILPKGNSDKLIPRKTKKFYWDTKKYGGFDSPIVAYSILVIADIEKGKSKKLKTVKALVGVTIMEKMTFERDPVAFLERKGYRNVQEENIIKLPKYSLFKLENGRKRLLASARELQKGNEIVLPNHLGTLLYHAKNIHKVDEPKHLDYVDKHKDEFKELLDVVSNFSKKYTLAEGNLEKIKELYAQNNGEDLKELASSFINLLTFTAIGAPATFKFFDKNIDRKRYTSTTEILNATLIHQSITGLYETRIDLSKLGGD

SEQ ID NO: 170 - protein, 1362 aa, Streptococcus oralis
ENKNYSIGLDIGTNSVGWAVITDDYKVPSKKMKVLGNTDKRFIKKNLIGALLFDEGTTAEARRLKRTARRRYTRRKNRLRYLQEIFAEEMSKVDSSFFHRLDDSFLIPEDKKGSKYPIFATLIEEKEYHKQFPTIYHLRKQLADSKEKTDLRLIYLALAHMIKYRGHFLYEDTFDIKNNDIQKIFNEFISIYNNTFEGNSLSGQNVQVEAIFTDKISKSAKRERVLKLFPDEKSTGLFSEFLKLIVGNQADFKKHFDLEEKAPLQFSRDTYDEDLENLLGQIGDDFADLFVAAKKLYDAILLSGILTVTDPSTKAPLSASMIERYENHQKDLATLKQFIKTNLPEKYDEVFSDQSKDGYAGYIDGKTTQESFYKYIKNLLSKFEGADYFLEKIEREDFLRKQRTFDNGSIPHQIHLQEMNAILRRQGEHYPFLKENKEKIEKILTFRIPYYVGPLARGNRDFAWLTRNSDQAIRPWNFEEIVDKASSAESFINKMTNYDLYLPEEKVLPKHSLLYETFAVYNELTKVKFIAEGLRDYQFLDSRQKKDIFYTLFKAEDKRKVTEKDIIQYLHTVDGYDGIELKGIEKQFNASLSTYHDLLKIIKDKEFMDDPNNEEILENIVHTLTIFEDREMIKQRLAQYDSLFDEKVIKALTRRHYTGWGKLSSKLINGIRDKQTGKTILDYLMDDGYNNRNFMQLINDDELSFKEIIKKAQVVGKTDDVKQVVQELPGSPAIKKGILQSIKLVDELVKVMGHEPESIVIEMARENQTTARGKKNSQQRYKRIEDSLKILASKILKEHPTDNIQLQNDRLFLYYLQNGRDMYTGKPLDINQLSSYDIDHIVPQAFIKDDSLDNRVLTSLKDNRGKSDNVPSLEVVEKMKTFWQQLLDSKLISYRKFNNLTKAERGGLDERDKVGFIKRQLVETRQITKHVAQILDARYNTEVNEKDKKNRTVKIITLKSNLVSNFRKEFRLYKIREINDYHHAHDAYLNAVVAKAILKKYPKLEPEFVYGDYQKYDLSKDPKEIEKATEKYFFYSNLLNFFKEEVHYADGTIVKRENIEYSKDTGEIAWNKEKDFATIKKVLSLPQVNIVKKREVQTGGFSKESILPKGNSDKLIPRKTKDILWDTTKYGGFDSPVIAYSILLIADIEKGKAKRLKTVKTLVGITIMEKATFEKSPIAFLENKGYHNVRKENILCLPKYSLFELKNGRRRMLASAKELQKGNEIVLPVHLTTLLYHAKNIHRLDEPEHLEYIQKHRNEFKGLLNLVSEFSQKYVLADANLEKIKNLYADNEQADIEILANSFINLLTFTALGAPAAFKFFGKDVDRKRYTTVSEILNATLIHQSITGLYETRIDLSKLGED

SEQ ID NO: 171 - protein, 1360 aa, Streptococcus oralis
ENKNYSIGLDIGTNSVGWSVITDDYKVPSKKMKVLGNTDKRFIKKNLIGALLFDEGTTAEARRLKRTARRRYTRRKNRLRYLQEIFAEEMSKVDSSFFHRLDDSFLIPEDKRGSKYPIFATLAEEKEYHKQFPTIYHLRKQLADSKEKTDLRLIYLALAHMIKYRGHFLYEDTFDIKNNDIQKIFSEFISIYDNTFEGSSLSGQNAQVEAIFTDKISKSAKRERVLKLFPDEKSTGLFSEFLKLIVGNQADFKKHFDLGEKAPLQFSKDTYDEDLENLLGQIGDDFADLFLVAKKLYDAILLSGILTVTDPSTKAPLSASMIERYENHQKDLAVLKQFIKNNLPEKYDEVFSDQSKDGYAGYIDGKTTQEAFYKYIKNLLSKFEGTDYFLEKIEREDFLRKQRTFDNGSIPHQIHLQEMNAILRRQGEHYPFLKDNKEKIEKILTFRIPYYVGPLARGNRDFAWLTRNSDEAIRPWNFEEIVDKASSAEDFINKMTNYDLYLPEEKVLPKHSLLYETFAVYNELTKVKFIAEGLRDYQFLDSGQKKQIVTQLFKEKRKVTEKDIIQFLHNVDGYDGIELKGIEKQFNASLSTYHDLLKIIKDKEFMDDSKNEEILENIVHTLTIFEDREMIKQRLAQYDSLFDEKVIKALIRRHYTGWGKLSAKLIDGICDKQTGNTILDYLIDDGKNNRNFMQLINDDGLSFKEITQKAQVVGKTDDVKQVVQELPGSPAIKKGILQSIKIVDELVKVMGHTPESIVIEMARENQTTARGKKNSQQRYKRIEDALKNLASNILKEHPTNNIQLQNDRLFLYYLQNGRDMYTGKPLDINQLSSYDIDHIVPQAFIKDDSLDNRVLTSLKDNRGKSDNVPSIEVVQKRKAFWQQLLDSKLISERKFNNLTKAERGGLDERDKVGFIKRQLVETRQITKHVAQILDARFNKEVNEKDKKNRTVKIITLKSNLVSNFRKEFRLYKVREINDYHHAHDAYLNAVVAKAILKKYPKLEPEFVYGDYQKYDLSRNPKEVEKATEKYFFYSNLLNFFKEEVHYADGTIVKRENIEYSKDTGEIAWNKEKDFATIKKVLSYPQVNIVKKREVQTGGFSKESILPKGNSDKLIPRKTKDILWETTKYGGFDSPVIAYSILLIADIEKGKAKKLKTVKTLVGITIMEKAAFEENPITFLENKGYHNVRKENILCLPKYSLFELENGRRRLLASAKELQKGNEIVLPVYLTTLLYHSKNVHKLDEPEHLEYIQKHRNEFKDLLNLVSEFSQKYVLADANLEKIQNLYADNEQADIEILANSFINLLTFTALGAPAAFKFFGKDIDRKRYTTVSEILNATLIHQSITGLYETRIDLSKLGED

SEQ ID NO: 172 - protein, 1358 aa, Streptococcus parasanguinis
KKPYSIGLDIGTNSVGWAVITDDYKVPAKKMKVLGNTNKESIKKNLIGALLFDAGNTAADRRLKRTARRRYTRRRNRILYLQEIFAAEMNKVDESFFHRLDDSFLVPEDKRGSKYPIFGTLEEEKEYHKQFPTIYYLRKILADSKEKVDLRLIYLALAHIIKYRGHFLYEDSFDIKNNDIQKIFNEFTILYDNTFEESSLSKGNAQVEEIFTDKISKSAKRDRVLKLFPDEKSTGLFSEFLKLIVGNQADFKKHFDLEEKAPLQFSKDTYEEDLESLLGQIGDVYADLFVVAKKLYDAILLAGILSVKDPGTKAPLSASMIERYDNHQNDLSALKQFVRRNLPEKYAEVFSDDSKDGYAGYIDGKTTQEGFYKYIKNLISKIEGAEYFLEKIEREDFLRKQRTFDNGSIPHQIHLQEMNAILRHQGEYYPFLKENKDKIEQILTFRIPYYVGPLARGNSDFAWLSRNSDEAIRPWNFEEMVDKSSSAEDFIHRMTNYDLYLPEEKVLPKHSLLYETFTVYNELTKVKYIAEGMKDYQFLDSGQKKQIVNQLFKEKRKVTEKDIIHYLHNVDGYDGIELKGIEKHFNSSLSTYHDLLKIIKDKEFMDDPKNEEIFENIVHTLTIFEDRVMIKQRLNQYDSIFDEKVIKALTRRHYTGWGKLSAKLINGIRDKKTSKTILDYLIDDGYSNRNFMQLINDDGLSFKETIQKAQVVGETNDVKQVVQELPGSPAIKKGILQSIKIVDELVKVMGHAPESVVIEMARENQTTNKGKSKSQQRLKTLSDAISELGNILKEHPTDNIQLQNDRLFLYYLQNGKDMYTGEALDINQLSNYDIDHIIPQAFIKDDSLDNRVLTSSKDNRGKSDNVPSLEIVEKMKGFWQQLLDSKLISERKFNNLTKAERGGLDERDKVGFIKRQLVETRQITKHVAQILDDRFNAEVNEKNQKLRSVKIITLKSNLVSNFRKEFGLYKVREINDYHHAHDAYLNAVVAKAILKKYPKLEPEFVYGDYQKYDLTKDPKEIEKATEKYFFYSNLLNFFKDKVYYADGTIIQRGNVEYSKDTGEIAWNKKRDFAIVRKVLSYPQVNIVKKTEEQTGGFSKESILPKGNSDKLIPRKTKNVQLDTTKYGGFDSPVIAYSILLVADVEKGKSKKLKTVKSLIGITIMEKVKFEANPVAFLEGKGYQNVVEENIIRLPKYSLFELENGRRRMLASAKELQKGNEMVLPSYLIALLYHAKRIQKKDEPEHLEYIKQHHSEFNDLLNFVSEFSQKYVLAESNLEKIKNLYIDNEQTNMEEIANSFINLLTFTAFGAPAVFKFFGKDIERKRYSTVTEILKATLIHQSLTGLYETRIDLSKLGEE

SEQ ID NO: 173 - protein, 1327 aa, Streptococcus parauberis
MKVLGNTDRQTVKKNMIGTLLFDSGETAEARRLKRTARRRYTRRINRIKYLQSIFDDEMSKIDSAFFQRIKDSFLVPDDKNDDRHPIFGNIKDEVDYHKNYPTIYHLRKKLADSDEKADLRLIYLALAHIIKFRGHFLIEGDLDSQNTDVNALFLKLVDTYNLMFEDDIDTQTIDATVILTEKMSKSRRLENLIAKIPNQKKNTLFGNLISLSLGLTPNFKANFELSEDAKLQISKESFEEDLDNLLAQIGDQYADLFIAAKNLSDAILLSDILTVKGVNTKAPLSASMVQRFNEHQDDLKLLKKLVKVQLPEKYKEIFDIKDKNGYAGYINGKTSQEDFYKYIKPILSKLKGAESLISKLEREDFLRKQRTFDNGSIPHQIHLNELKSIIRRQEKYYPFLKDKQVRIEKIFTFRIPYFVGPLANGNSSFAWVKRRSNESITPWNFEEVVEQEASAKVFIERMTNFDTYLPEEKVLPKHSLLYEMFTVYNELTKVKYQAEGMRKPEFLSSEEKIEIVSNLFKTERKVTVKQLKENYFNKIRCLDSITISGVEDKFNASLGTYHDLLNIIKNQKILDDEQNQDSLEDIVLTLTLFEDEKMIAKRLSKYESIFDPSILKKLKKRHYTGWGRLSQKLINGIRDKQTGKTILDFLIDGQANRNFMQLINDPSLDFASIIKEAQEKTIKSEKLEETIANLAGSPAIKKGILQSVKIVDEVVKVMGYEPSNIVIEMARENQSTQRGINNSRERLRKLEEVHKNIGSKILKEHEISNAQLQSDRVYLYLLQDGKDMYTGKDLDFDRLSQYDIDHIIPQSFIKDNSIDNIVLTSQESNRGKSDNVPYIAIVNKMKSYWQHQLKSGAISQRKFDNLTKAERGGLSEYDKAGFIKRQLVETRQITKHVAQILNNRFNNNVDDSSKNKRPVKIITLKSKMVSDFRKEFGFYKIREVNDYHHAHDAYLNAVVGTALLKKYPKLEAEFVYGDYKHYDLSDTSLGKATAKMFFYSNIMNFFKKEVRLADGTVITRPQIETNTETGEIVWDKVKDIKTIRKVLSIPQINVVKKTEVQTGGFSKESILSKRDSDKLIPRKNNWDPKKYGGFGSPIIAYSVLVVAKVTKGKSQKTKSVKELVGITIMEQNEFEKDRITFLEKKGYQDIQESLIIKLPKFSLFELENGRKRLLASELQKGNELSLPNKYIQFLYLASRYTSFSGKEEDREKHRHFVESHLHYFDEIKDIIADFSRRYILADANLEKILTLYNEKNQFSIEEQATNMLNLFTFTGLGAPATLKFFNVDIDRKRYTSSTEILNSTLIRQSITGLYETRIDLSKIGGD

SEQ ID NO: 174 - protein, 1355 aa, Streptococcus phocae
KKSYSIGLDIGTNSVGWAVITDDYKVPAKKMKVLGNTSRQSIKKNMIGALLFDEGGPAASTRVKRTTRRRYTRRKNRLCYLRDIFESEMHTIDKHFFLRLEDSFLHKSDKRYEAHPIFGTLQEEKAYHDNYPTIYHLRKALADNTEKADLRLIYLALAHIIKFRGHFLIEGALSANNTDVQQLVHALVDAYNIMFEEDLDIEAIDVKAILTEKISKTRRLENLISNIPGQKKNGLFGNLIALSLGLTPNFKSHFNLPEDAKLQLAKDTYDEELNNLLTQIGDEYADLFLSAKNLSDAILLSDILTVNGDGTQAPLSASLIKRYEEHRQDLALLKQMFKEQLPDLYRDVFTDENKDGYAGYISGKTSQEAFYKYIKPILETLDGAEDFLTKINREDFLRKQRTFDNGSIPHQIHLGELQAILERQQAYYPFLKDNQEKIEKILTFRIPYYIGPLARGNSRFAWLTRTSDQKITPWNFDEMVDQEASAQAFIERMTNFDEYLPQEKVLPKHSLTYEYFTVYNELTKVKYVTEGMTKPEFLSAGQKEQIVELLFKKYRKVTVKQLKEDFFSKIECFDTVDISGVEDKFNASLGTYHDLLKIIKDKAFLDNSENENIIEDIILTLTLFEDKEMIANRLAVYEDLFDQNVLKQLKRRHYTGWGRLSKQLINGMRDKHTGKTILDFLKDGFINRNFMQLINDDNLSFKEEIKKAQEGGLKDSINDQIRDLAGSPAIKKGILQTINIVDEIVKIMGKAPQHIVVEMARDVQKTDIGVKQSRERMKRVQEVLKKLGSQLLKEHPVENFQLQNERLYLYYLQNGKDMYTGEELSISNLSHYDIDHIIPRSFIKDDSIDNKVLTRSEHNRGKTDNVPSIEVVKRMKPYWQKLLDTKVISQRKFDNLTKAERGGLQESDKANFIQRQLVETRQITKHVAQILDSRFNTERDEKDRPIRRVKVITLKSKFVSDFRQDFGFYKLREINDYHHAHDAYLNAVVGTALLKMYPKLASEFVYGDYQKYDLSGKASGHATAKYFFYSNLMNFFKSEVKLANGNIIKRSPIEVNEETGEIVWDKTKDFGTVRKVLSAPQVNIVKKTEIQTGGFSNETILSKGKSSKLIPRKNKWRDTTKYGGFNTPTVAYSVLVVAKVEKGKAKKLKPVKELVGITIMERTKFEANPIAFLESKGYHDIQEHLMITLPKYSLFELENGRRRLLASELQKGNEMVLPQHLVTFLYRVSKRDKGTQSENMEYISNHKEKFIEIFHYIIRYAEKNVIKPKVIERLNDTFNQKFNDSDLTELSISFLNLFKFTSFGAPEKFTFLNSEIKQDDVRYRSTKECLNSTLIHQSVTGLYETRIDLSQFGGD

SEQ ID NO: 175 - protein, 1361 aa, Streptococcus pseudopneumoniae
SNKPYSIGLDIGTNSVGWAVITDDYKVPSKKMKVLGNTDKHFIKKNLIGALLFDEGTTAEDRRLKRTARRRYTRRKNRLRYLQEIFSEEISKVDNSFFHRLDDSFLVPEDKRGSKYPIFATLTEEKEYYKQFPTIYHLRKQLADSKEKADLRLIYLTLAHMIKYRGHFLYEESFDIKNNDIQKIFNEFISIYDNTFEGSSLSGQNAQVEAIFTDKISKSTKRERVLKLFPDQKSTGLFSEFLKLIVGNQADFKKHFDLEEKAPLQFSKDTYDEDLENLLGQIGDDFADLFLVAKKLYDAILLSGILTVTDPSTKAPLSASMIERYENHQKDLAALKQFIKNNLPEKYDEVFSDQSKEGYAGYIDSKTTQEAFYKYIKNLLSKIDGADYLLDKIEREDFLRKQRTFDNGSIPHQIHLQEMNAILRRQGEHYPFLKENREKIEKILTFRIPYYVGPLARGNRDFAWLTRNSDQAIRPWNFEEIVDKASSAEAFINKMTNYDLYLPEEKVLPKHSLLYETFAVYNELTKVKFIAEGLRDYQFLDSGQKKKIINQLFKEKRKVTEKDLIHYLHNVDGYDGIELKGIEKQFNASLSTYHDLLKIIKDKRFMDEPKNQEILENIVHTLTIFEDREMIKQRLAQYASIFDEKVIKTLTRRHYTGWGKLSAKLINCIRDRKTGKTILDYLIDDGYNNRNFMQLINDDGLSFKEIIQESQVVGKPDDVKQIVQELPGSSAIKKGILQSIKLVDELVKVMGHDPESIVIEMARENQTTARGKKNSQQRYKRIEDSLKILASNILKEHPTDNIQLQNDRLFLYYLQNGKDMYTGNPLDINHLSSYDIDHIIPQAFIKDDSLDNRVLTSSKDNRGKSDNVPSLEVVQKRKAFWQQLLESKLISERKFNNLTKAERGGLNERDKVGFIKRQLVETRQITKHVAQILDSRFNTKVNEKNQKIRTVKIITLKSNLVSNFRKEFRLYKVREINDYHHAHDAYLNAVVAKAILKKYPKLEPEFVYGDYQKYDLSRDPKEIEKATEKYFFYSNLLNFFKEEVHYADGTIVKRENIEYSKDTGEIAWNKEIDFATIRKILSLSQVNIVKKTEEQTGGLFDNNIVSKKKVVDASKLIPIKSGLSPEKYGGYARPTIAYSVLVIADIEKGKAKKLKRIKEMVGITIQDKKKFEANPTAYLEEYGYKNINPNLIIKLPKYSLFKFNDGQRRLLASSIELQKGNELILPYHFTTLLYHAQRINKISEPIHKQYVETHQSEFEELLTTIISLSKKYIQKPIVESLLQQAFEQADKDIYQLSESFISLLKLTSFGAPGAFRFLGVEISQSNVRYQSVSSCFNATLIHQSITGLYETRIDLSKLGED

SEQ ID NO: 176 - protein, 1361 aa, Streptococcus pseudopneumoniae
SNKPYSIGLDIGTNSVGWVIITDDYKVPSKKMKVLGNTDKHFIKKNLIGALLFDEGTTAEDRRLKRTARRRYTRRKNRLRYLQEIFAEEMNKVDSSFFHRLDDSFLVPEDKRGSKYPIFATLAEEKEYHKNFPTIYHLRKQLADSKEKADLRLIYLALAHMIKYRGHFLYEEAFDIKNNDIQKIFNEFINIYDNTFEGSSLSGQNEQVEAIFSDKISKSAKRERVLKLFPDEKSTGLFSEFLKLIVGNQADFKKHFDLEEKAPLQFSKDTYDEDLENLLGQIGDGFADLFLVAKKLYDAILLSGILTVTDPSTKAPLSASMIERYQNHQNDLASLKQFIKNNLPEKYDEVFSDQSKDGYAGYVDGKTTQEAFYKYIKNLLSKFEGADYFLEKIEREDFLRKQRTFDNGSIPHQIHLQEMNAILRRQGEHYPFLKENKEKIEKILTFRIPYYVGPLARGNRDFAWLTRNSDQAIRPWNFEEIVDKASSAEDFINKMTNYDLYLPEEKVLPKHSLLYETFAVYNELTKVKFIAEGLRDYQFLDSGQKKQIVNQLFKEKRKVTEKDIIQYLHNVDGYDGIELKGIEKQFNASLSTYHDLLKIIKDKEFMDDSKNEEILENIVHTLTIFEDREMIKQRLAQYDSIFDEKVIKALTRRHYTGWGKLSAKLINGIRDKQTGKTILDYLIDDGYSNRNFMQLINDDGLSFKEIIQKAQVFGKTNDVKQVVQELPGSPAIKKGILQSIKIVEELVKVMGHEPESIVIEMARENQTTTRGKKNSQQRYKRIENSLKILASKILKEHPTDNNQLQNDRLFLYYLQNGKDMYTGEALDINQLSSCDIDHIIPQAFIKDDSLDNRVLTSSKENRGKSDNVPCLEVVDKMKVFWQQLLDFKLISYRKFNNLTKAERGGLDERDKVGFIRRQLVETRQITKHVAQILDSRFNTEVTEKDKKNRNVKIITLKSNLVSNFRKEFGLYKVREINDYHHAHDAYLNAVVAKAILKKYPKLEPEFVYGDYQKYDLSKDPKDIEKATEKYFFYSNLLNFFKEEVHYADGTIVKRENIEYSKDTGEIAWNKEKDFATIKKILSLPQVNIVKKTEEQTGGLFDNNIVSKKKVVDASKLIPIKSGLSPEKYGGYARPTIAYSVLVIADIEKGKTKKLKRIKEMIGITVQDKKIFESNPIAYLEECGYKNINPNLIIKLPKYSLFEFNGGQRRLLASSIELQKGNELILPYHFTALLYHTQRINKISEPIHKQYVEAHQNEFKELLTTIISLSKKYIQKPNVESLLQQAFEQADKDIYQLSESFISLLKLTSFGAPGAFKFLGVEISQSSVRYKPNSQFLDATLIHQSITGLYETRIDLSKLGED

SEQ ID NO: 177 - protein, 1363 aa, Streptococcus pseudopneumoniae
SNKPYSIGLDIGTNSVGWAVITDDYKVPSKKMTVLGNTDKHFIKKNLIGALLFDEGTTAEDRRLKRTARRRYTRRKNRLRYLQEIFSGEMSKVDSSFFHRLDDSFLVPEDKRGSKYPIFATLVEEKEYHKQFPTIYHLRKQLADSKEKADLRLIYLVLAHMIKYRGHFLYEEAFDIKNNDIQKIFNEFISIYDNTFEGSSLSGQNAQVETIFTDKISKSAKRERVLKLFPDEKSTGLFSEFLKLIVGNQADFKKHFDLGEKAPLQFSKDTYDEDLENLLGQIGDDFADLFLVAKKLYDAILLSGILTVTDPSTKAPLSASMIERYENHQKDLTTLKQFIKNNLPEKYDEVFSDQSKDGYAGYIDGKTTQEAFYKYIKNLLSKFEGTDYFLEKIEREDFLRKQRTFDNGSIPHQIHLQEMNAILRRQGEHYPFLKENKEKIEKILTFRIPYYVGPLARGNRDFAWLTRNSDQAIRPWNFEEIVDKASSAEDFINKMTNYDLYLPEEKVLPKHSLLYETFAVYNELTKVKFIAEGLRDYQFLDSGQKKQIVNQLFKEKRKVTEKDIIHYLHTVDGYDGIELKGIEKQFNASLSTYHDLLKIIKDKEFMDDSKNEAILENIVHTLTIFEDREMIKQRLAQYDSLFDKKVIKALTRRHYTGWGKLSAKLINGICDKQTGNTILDYLIDDGEINRNFMQLINDDGLSFKKIIQKSQVVGETDDVKQVVRELPGSPAIKKGILQSIKIVDELVKVMDHAPESIVIEMARENQTTARGKKNSQQRYKRIEDSLKILASNILKENPTDNNQLQNDRLFLYYLQNGKDMYTGEALDINQLSSYDIDHIIPQAFIKDDSLDNRVLTSSKDNRGKSDNVPSLEVVQKRKAFWQQLLDSKLISERKFNNLTKAERERDGLNELDKVGFIKRQLVETRQITKHVAQILDARFNKEVTEKDKKNRNVKIITLKSNLVSNFRKEFRLYKVREINDYHHAHDAYLNAVVAKAILKKYPKLEPEFVYGDYQKNDLSKDPKDIEKATEKYFFYSNLLNFFKEEVHYADGTIVKRENIEYSKDTGEIAWNKEKDFATIKKVLSYPQVNIVKKTEEQTGGLFDNNIVSKEKVVDASKLIPIKSGLSPEKYGGYARPTIAYSVLVIADIEKGKTKKLKRIKEMVGITIQDKKKFEANPIAYLEECGYKNINPNLIIKLPKYSLFEFNGGQRRLLASSIELQKGNELILPYHFTALLYHAQRINKFSEPIHKQYVEAHQNEFKELLTIIISLSKKYIQKPNVESLLHQAFEQADNDIYQLSESFISLLKLTSFGAPGAFKFLGAEISQSSVRYKPNSQFLDTTLIHQSITGLYETRIDLSKLGED

SEQ ID NO: 178 - protein, 1360 aa, Streptococcus pseudoporcinus
YSYSIGLDIGTNSVGWAVINEDYKVPAKKMTVFGNTDRKTIKKNLLGTVLFDSGETAQARRLKRTNRRRYTRRRYRLCQLQNIFATEMVKVDDTFFQRLSESFFYYQDKAFDKHPIFGNSKEERAYHKTYPTIYHLRKDLADRDQKADLRLIYLALSHIIKFRGHFLIEGKLNSENTDVQKLFIALVTVYNLLFEEEIAGETCDAKALLTAKTSKSKRLESLISEFPGQKKNGLFGNLLALALGLRPNFKSNFGLSEDAKLQITKDTYEEELDNLLAEIGDHYADLFLAAKNLSDAILLSDILTLSDENTRAPLSASMIKRYEEHQEDLALLKKLVKEQMPEKYWEIFSNAKKNGYAGYIEGKVSQEDFYRYIKPILSRLKGGDEFLAKIDRDDFLRKQRTFDNGSIPHQIHLKELHAILRRQEKYYPFLAEQKEKIEQLLCFRIPYYVGPLAKGGNSSFAWLKRRSDEPITPWNFKDVVDEEASAQAFIEGMTNYDTYLPEEKVLPKHSPLYEMFTVYNELTKVKYIAENMTKPLYLSAEQKEAIIDHLFKQTRKVTVKDLKEKYFSQIEGLENVDVTGVEGAFNASLGTYNDLLKIIKDKAFLDDEANAEILEEIVLILTLFQDEKLIEKRLAKYANLFEKSVLKKLRKRHYRGWGRLSRQLIDGMKDKASGKTILDFLKDDFANRNFIQLINDSSLDFEKLIDDAQKKAIKRESLTEAVANLAGSPAIKKGILQSLKVVDEIVKVMGHNPDNIVIEMSRENQTTAQGLKNARQRLKKIKEVHKKTGSRILEDNSERITNLTLQDNRLYLYLLQDGKDMYTGQDLDINNLSQYDIDHIIPQSFIKDNSIDNLVLTTQKANRGKSDNVPSIEVVRDMKDRVWRRQLANGAISRQKFDHLTKAERGGLADSDKARFLRRQLVETRQITKHVAQLLDSRFNSKSNQNKKLARNVKIITLKSKIVSDFRKDFGLYKLREVNNYHHAHDAYLNAVVGTALLKKYPKLEAEFVYGDYKHFDLSDPSLGKATAKVFFYSNIMNFFKEELSLADGTLMKRPVIETNTETGEVVWDKVKDFKTIRKVLSYPQVNIVKKTEIQSGAFSKESVLSKGNSDKLIERKKGWDPKKYGGFDSPNTAYSIFVVAKVAKRKAQKLKTVKEIVGITIMEQAEYEKDNIAFLEKKGYQDIQEKLLIKLPKYSLFELENGRRRLLASEFQKGNELALSGKYMKFLYLASRYDKLSSKIESEQQKKLFVEQHLHYFDEILDIVVKHATCYIKAENNLKKIISLYKKKEAYSINEQALNMLNLFIFTSLGAPSTFVFFDETIDRKRYTTSSDVLNGILIQQSITGLYETRIDLSRFGGD

SEQ ID NO: 179 - protein, 1316 aa, Streptococcus pseudoporcinus SPIN 20026
MLGTVLFDSGETAQARRLKRTNRRRYTRRRYRLCQLQNIFATEMVKVDDTFFQRLSESFFYYQDKAFDKHPIFGNSKEERAYHKTYPTIYHLRKDLADRDQKADLRLIYLALSHIIKFRGHFLIEGKLNSENTDVQKLFIALVTVYNLLFEEEIAGETCDAKALLTAKTSKSKRLESLISEFPGQKKNGLFGNLLALALGLRPNFKSNFGLSEDAKLQITKDTYEEELDNLLAEIGDHYADLFLAAKNLSDAILLSDILTLSDENTRAPLSASMIKRYEEHQEDLALLKKLVKEQMPEKYWEIFSNAKKNGYAGYIEGKVSQEDFYRYIKPILSRLKGGDEFLAKIDRDDFLRKQRTFDNGSIPHQIHLKELHAILRRQEKYYPFLAEQKEKIEQLLCFRIPYYVGPLAKGGNSSFAWLKRRSDEPITPWNFKDVVDEEASAQAFIEGMTNYDTYLPEEKVLPKHSPLYEMFTVYNELTKVKYIAENMTKPLYLSAEQKEAIIDHLFKQTRKVTVKDLKEKYFSQIEGLENVDVTGVEGAFNASLGTYNDLLKIIKDKAFLDDEANAEILEEIVLILTLFQDEKLIEKRLAKYANLFEKSVLKKLRKRHYRGWGRLSRQLIDGMKDKASGKTILDFLKDDFANRNFIQLINDSSLDFEKLIDDAQKKAIKRESLTEAVANLAGSPAIKKGILQSLKVVDEIVKVMGHNPDNIVIEMSRENQTTAQGLKNARQRLKKIKEVHKKTGSRILEDNSERITNLTLQDNRLYLYLLQDGKDMYTGQDLDINNLSQYDIDHIIPQSFIKDNSIDNLVLTTQKANRGKSDNVPSIEVVRDMKDRVWRRQLANGAISRQKFDHLTKAERGGLADSDKARFLRRQLVETRQITKHVAQLLDSRFNSKSNQNKKLARNVKIITLKSKIVSDFRKDFGLYKLREVNNYHHAHDAYLNAVVGTALLKKYPKLEAEFVYGDYKHFDLSDPSLGKATAKVFFYSNIMNFFKEELSLADGTLMKRPVIETNTETGEVVWDKVKDFKTIRKVLSYPQVNIVKKTEIQSGAFSKESVLSKGNSDKLIERKKGWDPKKYGGFDSPNTAYSIFVVAKVAKRKAQKLKTVKEIVGITIMEQAEYEKDNIAFLEKKGYQDIQEKLLIKLPKYSLFELENGRRRLLASEFQKGNELALSGKYMKFLYLASRYDKLSSKIESEQQKKLFVEQHLHYFDEILDIVVKHATCYIKAENNLKKIISLYKKKEAYSINEQALNMLNLFIFTSLGAPSTFVFFDETIDRKRYTTSSDVLNGILIQQSITGLYETRIDLSRFGGD

SEQ ID NO: 180 - protein, 1359 aa, Streptococcus sanguinis
KKPYSIGLDIGTNSVGWAVVTDDYKVPAKKMRVFGDTDRSHIKKNLLGTLLFDDGNTAESRRLKRTARRRYTRRRNRILYLQEIFTESMNEIDESFFHRLDDSFLVPEDKRGSKYPIFATLQEEKEYHKQFPTIYHLRKQLADSKEKSDVRLIYLALAHMIKYRGHFLYEETFDIKNNDIQKIFNEFINIYDNTFEGSSLSGQNAQVEAIFTDKISKSAKRERVLKLFPDEKSTGLFSEFLKLIVGNQADFKKHFDLEEKAPLQFSKDTYDEELENLLGQIGDDFADLFLIAKKLYDAILLSGILTVTDPSTKAPLSASMIERYENHQKDLAALKQFIKNNLPEKYVEVFSDQSKDGYAGYIDGKTTQEAFYKYIKNLLSKFEGADYFLDKIEREDFLRKQRTFDNGSIPHQIHLQEMNAILRRQGEHYPFLKENREKIEKILTFRIPYYVGPLARDNRDFSWLTRNSDEPIRPWNFEEVVDKARSAEDFIHRMTNYDLYLPEEKVLPKHSLLYETFAVYNELTKVKFIAEGLRDYQFLDSGQKKQIVNQLFKEKRKVTEKDIIHYLHNVDGYDGIELKGIEKQFNANLSTYHDLLKITKDKEFMDDPKNEEILENIVHTLTIFEDREMIKQRLAQYDTLFDEKVIKALTRRHYTGWGKLSAKLINGIRDKQSGKTILDYLIDDDKINRNFMQLINDDGLSFKEIIQKAQVVGKTDDVKQVVQELPGSPAIKKGILQSIKIVDELVKVMGYALESIVIEMARENQTTARGKKNSQQRYKRIEDALKNLAPNILKENPTDNIQLKNDRLFLYYLQNGKDMYTGKPLDINQLSSYDIDHIIPQAFIKDDSIDNRVLTSSKDNRGKSDNVPSLEVVQKRKAFWQQLLDSKLISERKFNNLTKAERGGLDERDKVGFIRRQLVETQQITKNVAQILDARFNTEVKEKNQKIRTVKIITLKSNLVSNFRKEFGLYKVREINNYHHAHDAYLNAVVAKAILKKYPKLEPEFVYGDYQKYDLFKPSKEIEKATEKYFFYSNLLNFFKEEVLYADGTIRKRENIEYSKDTGEIAWDKEKDFATIKKVLSYPQVNIVKKREVQTGGFSKESILPKGNSDKLIPRKTKDILWDTTKYGGFDSPVIAYSILLIADIEKGKAKKLKTVKTLVGITIMEKAAFEENPITFLENKGYHNVRKENILCLPKYSLFELENGRRRLLASAKELQKGNEIVLPVCLTTLLYHSKNLHKLDEPEHLEYIQKHRNEFKDLLNLVSEFSQKYILAEANLEKIKDLYADNEQADIEILANSFINLLTFTALGAPAAFKFFGKDVDRKRYTTVSEILNATLIHQSITGLYETRIDLSKLGEE

SEQ ID NO: 181 - protein, 1362 aa, Streptococcus sanguinis
KKPYSIGLDIGTNSVGWAVITDDYKVPSKKMKVLGNTDKHFIKKNLIGALLFDEGTTAEDRRLKRTSRRRYTRRKNRLRYLQEIFSEEISKLDSSFFHRLDDSFLVPEDKRGSKYPIFATLEEEKEYHKKFPTIYHLRKHLADSKEKTDLRLIYLALAHMIKYRGHFLYEESFDIKNNDIQKIFNEFISIYDNTFEGSSLSGQNAQVEAIFTDKISKSTKRERVLKLFSDEKSTGLFSEFLKLIVGNQADFKKHFDLEEKAPLQFSKDTYDEDLENLLGQIGDGFADLFLVAKKLYDAILLSGILTVTDPSTKAPLSASMIERYENHQEDLAALKQFIKNNLSEKYAEVFSDQSKDGYAGFIDGKTTQEAFYKYIKNLLSKLEGADYFLNKIEREDFLRKQRTFDNGSIPHQIHLQEMNAILRRQGEHYLFLKENREKIEKILAFRIPYYVGPLARGNRDFAWLTRNSDQAIRPWNFEEVVDKASSAEDFINKMTNYDLYLPEEKVLPKHSLLYETFAVYNELTKVKFIAEGLRDYQFLDSGQKKQIVNQLFKDKRKVTEKDIIHYLHNVDGYDGIELKGIEKQFNASLSTYHDLLKIIKDKEFMDNPKNGEILENIIHTLTIFEDREMIKQRLAQYDTLFDEKVIKALTRRHYTGWGKLSAKLINGIRDKQTGKTILEYLIDDGDCNRNFMQLINDDGLSFKEIIQKAQVVGKTDDVKQVVQEIPGSPAIKKGILQSIKIVDELVKVMGHNPESIVIEMARENQTTAKGKKNSQQRYKRIEDALKNLAPNILKENPTDNIQLQNDRLFLYYLQNGKDMYTGKAIDINQLSNYDIDHIIPQAFIKDDSLDNRVLTSSKDNRGKSDNVPSIEVVQKRKAFWQQLLDSKLISERKFNNLTKAKRGGLDERDKVGFIKRQLVETRQITKHVAQLLDTRFNTEVNEENQKIRTVKIITLKSNLVSNFRKEFGLYKVREINDYHHAHDAYLNAVVAKAILKKYPKLEPEFVYGDYQKYDLSKASNTIDKATEKYFFYSNLLNFFKEKVRYADGTIKKRENIEYSNDTGEIAWNKEKDFATIKKVLSLPQVNIVKKTEEQTGGLFDNNIVSKKKVVDASKLIPIKSSLSPEKYGGYARPTIAYSVLVIADIEKGKGKAKKLKRIKEIVGITIQDKKKFESNPVTYLEECGYKNINSNLIIKLPKYSLFEFNDGQRRLLASSIELQKGNELILPYHLTALLYHAQRINKISEPIHKQYVEAHQNEFKELLTTIISLSKKYIQKPNVELLLQQAFDQADKDIYQLSESFISLLKLTSFGAPGAFKFLGVEISQSSVRYKPNSQFLDTTLIHQSITGLYETRIDLSKLGED

SEQ ID NO: 182 - protein, 1360 aa, Streptococcus sp. F0441
ENKNYSIGLDIGTNSVGWSVITDDYKVPSKKMKVLGNTDKHFIKKNLIGALLFDEGTTAEARRLKRTARRRYTRRKNRLRYLQEIFSEEIGKVDSSFFHRLDDSFLIPEDKRGSKYPIFATLAEEKKYHKQFPTIYHLRKQLADSKEKTDLRLIYLALAHMIKYRGHFLYEEAFDIKNNDIQKIFNEFISIYNNTFEGNSLSGQNVQVEAIFTDKISKSAKRERVLKLFPDEKSTGLFSEFLKLIVGNQADFKKHFDLEEKAPLQFSRDTYDEDLENLLGQIGDDFADLFLVAKKLYDAILLSGILTVTNPSTKAPLSASMIERYENHQKDLASLKQFIKNNLPEKYDEVFSDQSEDGYAGYIDGKTTQETFYKYIKNLLSKFEGADYFLDKIEREDFLRKQRTFDNGSIPHQIHLQEMNAILRRQGEHYPFLKENKEKIEKILTFRIPYYVGPLARGNRDFAWLTRNSDQAIRPWNFEEIVDKASSAEDFINKMTNYDLYLPEEKVLPKHSLLYETFAVYNELTKVKFIAEGLRDYQFLDSGQKKQIVTQLFKEKRKVTEKDIIQFLHNVDGYDGIELKGIEKQFNASLSTYHDLLKIIKDKAFMDDAKNEAILENIVHTLTIFEDREMIKQRLAQYDSLFDEKVIKALTRRHYTGWGKLSAKLINGISDKQTGNTILDYLIDDGEINRNFMQLINDDGLSFKEIIQKAQVVGKTNDVKQVVQELPGSPAIKKGILQSIKIVDELVKVMGHAPESIVIEMARENQTTARGKKNSQQRYKRIEDSLKILASKILKEHPTDNIQLQNDRLFLYYLQNGKDMYTGEALDINQLSSCDIDHIIPQAFIKDDSLDNRVLTSSKDNRGKSDNVPSLEVVDKMKVFWQQLLDSKLISYRKFNNLTKAERGGLNELDKVGFIKRQLVETRQITKHVAQILDARFNKEVTEKDKKNRTVKIITLKSNLVSNFRKEFELYKVREINDYHHAHDAYLNAVVAKAILKKYPKLEPEFVYGDYQKYDLSKDPKEIEKATEKYFFYSNLLNFFKEEVHYADGTIVKRENIEYSKDTGEIAWNKEKDFATIKKVLSLPQVNIVKKREVQTGGFSKESILPKGNSDKLIPRKTKDILWDTTKYGGFDSPVIAYSILLIADIEKGKAKKLKTVKTLVGITIMEKDAFEKNPIAFLENKGYHNVCKENILCLPKYSLFELENGRRRLLASAKELQKCNEIVLPVYLTTLLYHSKNVHKLDEPGHLEYIQKHRNEFKDLLNLVSEFSQKYVLADANLEKIKNLYADNEQADIEILANSFINLLTFTALGAPAAFKFFGKDVDRKRYTTVSEILNATLIHQSITGLYETRIDLSKLGED

SEQ ID NO: 183 - protein, 1360 aa, Streptococcus sp. FF10
MKKPYSIGLDIGTNSVGWSVVTDDYKVPAKKMKVLGNTDKEYIKKNLIGALLFDSGETAEATRMKRTARRRYTRRRNRILYLQDIFSPELNQVDESFLHRLDDSFLVAEDKRGERHVIFGNIADEVKYHKEFPTIYHLRKHLADSSEKADLRLVYLALAHIIKYRGHFLIDEPIDIRNMNSQNLFKEFLLAFDGIQVDCYLASKHTDISGIITAKISKSRKVEAVLEQFPDQKKNSFFGNMVSLVFGLMPNFKSNFELDEDAKLQFSRDSYDEDLENLLGIIGDEYADVFVAAKKVYDSILLSGILTTNNHSTKAPLSASMIDRYDEHNSDKKLLRDFIRTNIGKEVFKEVFYDTSKNGYAGYIDGKTNQEDFYKYLKNLLQKVDGGDYFIEKIEREDFLRKQRTFDNGSIPHQVHLDEMKAILRRQGEFYPFLKENAEKIQQILTFKIPYYVGPLARGNSRFAWASYNSNEKMTPWNFDNVIDKTSSAQAFIERMTNNDLYLPDQKVLPKHSLLYQKFAVYNELTKIKYVTETGEARLFDVFLKKEIFDGLFKKERKVTKKKILNFLDKNFDEFRITDIQGLDNETGNFNASYGTYHDLLKIIGDKEFMDSSDNVDVLEDIVLSLTLFEDREMIKQRLLKYEDIFSKKVIANLTRRHYTGWGRLSAKLINGIKDKHSRKTILDYLIDDGHSNRNFMQLINDDNLSFKDEIANSQVIGDGDDLHQVVQELAGSPAIKKGILQSLKIVDELVKVMGYNPEQIVVEMARENQTTARGRNNSQQRLGSLTKAIQDFGSDILKRYPVENNQLQNDQLYLYYLQNGKDMYTGDTLDIHNLSQYDIDHIIPQSFIKDNSLDNRVLTNSKSNRGKSDNVPSNEVVKRMKGFWLKQLDAKLISQRKFDNLTKAERGGLSAEDKAGFIKRQLVETRQITKHVARILDERFNRDFDKNDKRIRNVKIVTLKSNLVSNFRKEFGFYKVREINNFHHAHDAYLNAVVAKALLIRYPKLEPEFVYGEYPKYNSYRERKATEKMFFYSNIMNMFKTTIKLADGRVVEKPVIEANEETGEIAWDKTKHFANVKKVLSYPQVSIVKKVEEQTGGFSKESILPKGGSDKLIARKTKNNYLSTQKYGGFDSPTVAYSIMFVADIEKGKSKRLKTVKEMIGITIMERSRFESNSVTFLEEKGYRNIRENTIIKFPKYSLFELENGRRRLLASAIELQKGNEMFLPQQFVNLLYHAQHANKEDSVIYLEKHRHELSELFHHIIGVSEKTILKPKVEMTLNEAFEKHFEFDEVSELAQSFISLLKFTAFGAPGGFKFLDADIKQSNLRYQTVTEVLSSTLIHQSVTGLYETRIDLSKLGGE

SEQ ID NO: 184 - protein, 1364 aa, Streptococcus sp. M334
SNKSYSIGLDIGTNSVGWAVITDDYKVPSKKMKVLGNTDKHFIKKNLIGALLFDEGTTAEDRRLKRTARRRYTRRKNRLRYLQEIFSQEISKVDSSFFHRLDDFFLVPEDKRGSKYPIFATLVEEKEYHKKFPTIYHLRKHLADSKEKTDLRLIYLALAHMIKYRGHFLYEESFDIKNNDIQKIFSEFISIYDNTFEGKSLSGQNAQVEAIFTDKISKSTKRERVLKLFPDEKSTGLFSEFLKLIVGNQADFKKHFDLEEKAPLQFSKDTYDEDLENLLGQIGDDFADLFLVAKKLYDAILLSGILTVKDLSTKAPLSASMIERYENHQKDLAALKQFIQNNLQEKYDEVFSDQSKDGYAGYIDGKTTQEAFYKYIKNLLSKFEGADYFLDKIEREDFLKKQRTFDNGSIPHQIHLQEMNAIIRRQGEHYPFLQENKEKIEKILTFRIPYYVGPLARGNGDFAWLTRNSDQAIRPWNFEEIVDQASSAEDFINKMTNYDLYLPEEKVLPKHSLLYETFAVYNELTKVKFIAEGLTRYQFLDKKQKKDIFDTFFKAENKRKVTEKDIIHYLHNVDGYDGIELKGIEKQFNASLSTYHDLLKIIKDKAFMDDSKNEEILENIIHTLTIFEDREMIKQRLAQYDSLFDEKVIKALTRRHYTGWGKLSAKLINGIRDKKSGKTILDYLIDDGEINRNFMQLIHDDGLSFKEIIQKAQVFGKTNDVKQVVQELPGSPAIKKGILQSIKIVDELVKVMGHAPESIVIEMARENQTTARGKKNSQQRYKRIEDSLKNLASNILKENPTDNIQLQNDRLFLYYLQNGRDMYTGKPLEINQLSNYDIDHIIPQAFIKDDSLDNRVLTSSKDNRGKSDNVPSLEVVEKMKAFWQQLLDSKLISERKFNNLTKAERERGGLNELDKVGFIKRQLVETRQITKHVAQFLDARFNKEVTEKDKKNRNVKIITLKSNLVSNFRKEFGLYKVREINDYHHAHDAYLNAVLAKAILKKYPKLEPEFVYGDYQKYDLSREPKEVEKATQKYFFYSNLLNFFKEEVHYADGTIVKRENIEYSKDTGEIAWNKEKDFATVKKVLSLPQVNIVKKTEVQTGGFSKESILPKGNSDKLIPRKTKEILWDTTKYGGFDSPVIAYSILLIADIEKGKAKKLKTVKTLVGITIMEKATFEKNPITFLENKGYHNVRKENILCLPKYSLFELESGRRRMLASAKELQKGNEIVLPVYLTTLLYHSKNVHKLDEPEHLEYIQKHRYEFKDLLNLVSEFSQKYVLADANLEKIKNLYADNEQADIEILANSFINLLTFTALGAPAAFKFLGKDVDRKRYTTVSEILNATLIHQSITGLYETRIDLSKLGED

SEQ ID NO: 185 - protein, 1360 aa, Streptococcus sp. taxon 056
NNNNYSIGLDIGTNSVGWAVITDDYKVPSKKMRVLGNTDKRFIKKNLIGALLFDEGTTAEDRRLKRTARRRYTRRKNRLRYLQEIFAEEMSKVDSSFFHRLDDSFLVPEDKSGSKYPIFATLAEEKEYHKKFPTIYHLRKHLADSKEKADLRLIYLALAHITKYRGHFLYEEAFDIKNNDIQKIFNEFINIYDNTFEGSSLSGQNAQVEAIFTGKISKSVKREHVLKLFPDEKSTGLFSEFLKLIVGNQADFKKHFDLEEKASLQFSKDTYDEDLENLLGQIGDDFADLFLVAKKLYDAILLSGILTVTDPSTKAPLSASMIERYENHQEDLAALKQFIKNNLPEKYAEVFSDQSKDGYAGYIDGKTTQEAFYKYIKNLLSKFEGADYFLDKIEREDFLRKQRTFDNGSIPHQIHLQEMNAILRRQGEHYPLLKENKEKIEKILTFRIPYYVGPLARGNRDFAWLTRNSDQAIRPWNFEEIVDKASSAESFINKMTNYDLYLPEEKVLPKHSLLYETFAVYNELTKVKFIAEGLRDYQFFDSGQKKQIVNQLFKEKRKVTEKDIIHYLHNVDGYDGIELKGIEKQFNASLSTYHDLLKIIKDKEFMDNHKNQEILENIVHTLTIFEDREMIKQRLAQYDSIFDEKVIKALTRRHYTGWGKLSAKLINGICDKKTGKTILDYLIDDGYNNRNFMQLINDDGLSFKEIIQKAQVVGKTDDLTQVVRELSGSPAIKKGILQSIKIVDELVKIMGYAPESIVIEMARENQTTAKGKKNSQQRYKRIEDALKNLAPTISKENPTDNIQLQNDRLFLYYLQNGKDMYTGEALDINQLSSYDIDHIIPQAFIKDDSLDNRVLTSSKDNRGKSDNVPSLEVVKKRKAFWQQLLDSKLISERKFNNLTKAERGGLDERDKVGFIKRQLVETRQITKHVARILDARFNTEVSEKNQKIRSVKIITLKSNLVSNFRKEFKLYKVREINDYHHAHDAYLNAVVAKAILKKYPKLEPEFVYGDYQKYDLSKDPKEVEKATEKYFFYSNLLNFFKEEVHYADGTIVKRENIEYSKDTGEIAWNKEKDFVTIKKVLSYPQVNIVKKREVQTGGFSKESILPKGNSDKLIPRKTKDILWDTTKYGGFDSPVIAYSILLIADIEKGKAKKLKTVKTLVGITIMEKAAFEKNPITFLENKGYHNVRKENILCLPKYSLFELENGRRRLLASAKELQKGNEIVLPVYLTTLLYHSKNVHKLDEPEHLEYIQKHRYEFKDLLNLVSEFSQKYVLAEANLEKIKSLYVDNEQADIEILANSFINLLTFTALGAPAAFKFFGKDVDRKRYTTVSEILNATLIHQSITGLYETRIDLSKLGED

SEQ ID NO: 186 - protein, 1359 aa, Streptococcus suis
MKKKYAIGIDIGTNSVGWSVVTDDYKVPSKKMKVFGNTEKRYIKKNLLGTLLFDEGNTAENRRLKRTARRRYTRRRNRILYLQEIFAEEINKIDDSFFQRLDDSFLIVEDKQGSKHPIFGTLQEEKKYHKQFPTIYHLRKQLADSSQKADIRLIYLALAHIIKYRGHFLFEGDLKSENKDVQHLFNDFVEMFDKTVEGSYLSENLPNVADVLVEKVSKSRRLENILHYFPNEKKNGLFGNFLALALGLQPNFKTNFELAEDAKIQFSKETYEEDLEELLGKIGDDYADLFIATKSLYDGILLAGILSTTDSTTKAPLSSSMVNRYEEHKKDLALLKNFIHQNLSDSYKEVFNDKLKDGYAGYIEGKTTQENFYRFIKKAIEKIEGSDYFIDKIDREDFLRKQRTFDNGSIPHQIHLQEMHAIIRRQAEFYPFLVENQDKIEKILTFRIPYYVGPLARGKSEFAWLNRKSDEKIRPWNFDEMVDKETSAENFITRMTNYDQYLPDQKVLPKHSLLYEKFAVYNELTKVKFIAEGMRDYQFLDSGQKKDIVKTLFKTKRKVTAKDIKAYLENSNGYAGVELKGLEEQFNASLPTYHDLLKILRDKAFIDAEENQEILEDIVLTLTLFEDREMIRKRLEKYKDILTEEQRKKLERRHYTGWGRLSAKLINGILDKVTRKTILGYLIDDGTSNRNFMQLINDDTLSFVDEIRLAQGSGEAEDYRAEVQNLAGSPAIKKGILQSLKIVDELIEVMGYDPEHIVVEMARENQFTNQGRRNSQQRYKKIENAIKNLNSKILKEYPTNNQALQNDRLFLYYLQNGKDMYTDEELDIDQLSQYDIDHIIPQAFIKDDSLDNKVLTKSAKNRGKSDDVPSLEIVHKKKNFWKQLLDSQLISQRKFDNLTKAERGGLTNEDKARFIQRQLVETRQITKHVARILDTRFNTKLDEAGNRIRDPKVNIITLKSNLVSQFRKDYQLYKVREINNYHHAHDAYLNAVVATALLKKYPQLAPEFVYGDYPKYNSYKSRKATEKVLFYSNIMNFFRRVLVYSKTGEVRIRPVIEVNKETGEIVWDKKSDFRTVRKVLSYPQVNVVKKVEMQTGGFSKESILQHGDSDKLIPRKTEKFYLDTKKYGGFDSPTIAYSVLLIADIEKGKAKKLKRVKELIGITIMERMAFEKNPIEFLEHKGYKNILEKNIIKLPKYSLFELENGRRRLLASAKELQKGNEMILPPHLVTLLYHSSNIHKITEPIHLNYVNKNKHEFKELLRHISDFSTRYILAQDRLSKIEELYDKNDGDDISDLTSSFVNLLTFTAIGAPAAFKFLGSVIDRKRYTSIAEILEATLIHQSVTGLYETRIDLSKLGGD

SEQ ID NO: 187 - protein, 1361 aa, Streptococcus suis
MKKKYAIGIDIGTNSVGWSVVTDDYKVPSKKMKVFGNTEKRYIKKNLLGTLLFDEGNTAENRRLKRTARRRYTRRRNRILYLQEIFAEEINKIDDSFFQRLDDSFLIVEDKQGSKHPIFGTLQEEKEYHKQFPTIYHLRKQLADSSQKADIRLIYLALAHIIKYRGHFLFEGDLKSENKDVQHLFNDFVEMFDKTVEGSYLSENLPNVADVLVEKVSKSRRLENILHYFPNEKKNGLFGNFLTLALGLQPNFKTNFELAEDAKIQFSKETYEEDLEELLGKIGDDYADLFIATKSLYDGILLAGILSTTDSTTKAPLSSSMVNRYEEHQKDLALLKNFIHQNLSDSYKEVFNDKLKDGYAGYIEGKTTQENFYRFIKKAIEKIEGSNYFIDKIDREDFLRKQRTFDNGSIPHQIHLQEMHAIIRRQAEFYPFLVENQDKIEKILTFRIPYYVGPLARGKSEFAWLNRKSDEKIRPWNFDEMVDKETSAENFITRMTNYDQYLPDQKVLPKHSLLYEKFAVYNELTKVRYVTEQGKSFFFDANMKQEIFDGVFKVYRKVTKEKLMDFLGKEFDEFRIVDLLGLDKDNKSFNASLGTYHDLKKIVSKDLLDNPENEDILENVVLTLTLFEDREMIRKRLEKYKDVLTEEQRKKLERRHYTGWGRLSAKLINGIRDKVTRKTILDYLIDDGTSNRNFMQLINDDTLSFVDEIRLAQGSGEAEDYRAEVQNLAGSPAIKKGILQSLKIVDELIEVMGYDPEHIVVEMARENQFTNQGRRNSQQRYKKIENAIKNLNSKILKEYPTNNQALQNDRLFLYYLQNGKDMYTDEELDIDQLSQYDIDHIIPQAFIKDDSLDNKVLTKSAKNRGKSDDVPSLEIVHKKKNFWKQLLDSQLISQRKFDNLTKAERGGLTNEDKARFIQRQLVETRQITKHVARILDTRFNTKLDEAGNRIRDPKVNIITLKSNLVSQFRKDYQLYKVREINNYHHAHDAYLNAVVATALLKKYPQLAPEFVYGDYPKYNSYKSRKATEKVLFYSNIMNFFRRVLVYSKTGEVRIRPVIEVNKETGEIVWDKKSDFRTVRKVLSYPQVNVVKKVEMQTGGFSKESILQHGDSDKLIPRKTEKFYLDTKKYGGFDSPTIAYSVLLIADIEKGKAKKLKRVKELIGITIMERMAFEKNPIEFLEHKGYKNILEKNIIKLPKYSLFELENGRRRLLASAKELQKGNEMILPPHLVTLLYHSSNIHKITEPIHLNYVNKNKHEFKELLRHISDFSTRYILAQDRLSKIEELYDKNDGDDISDLTSSFVNLLTFTAIGAPAAFKFLGSVIDRKRYTSIAEILEATLIHQSVTGLYETRIDLSKLGGD

SEQ ID NO: 188 - protein, 1361 aa, Streptococcus suis
MKKKYAIGIDIGTNSVGWSVVTDDYKVPSKKMKVFGNTEKRYIKKNLLGTLLFDEGNTAENRRLKRTARRRYTRRRNRILYLQEIFAEEINKIDDSFFQRLDDSFLIVEDKQGSKHPIFGTLQEEKEYHKQFPTIYHLRKQLADSSQKADIRLIYLALAHIIKYRGHFLFEGDLKSENKDVQHLFNDFVEMFDKTVEGSYLSENLPNVADVLVEKVSKSRRLENILHYFPNEKKNGLFGNFLALALGLQPNFKTNFELAEDAKIQFSKETYEEDLEELLGKIGDDYADLFIATKSLYDGILLAGILSTTDSTTKAPLSSSMVNRYEEHQKDLALLKNFIHQNLSDSYKEVFNDKLKDGYAGYIEGKTTQENFYRFIKKAIEKIEGSNYFIDKIDREDFLRKQRTFDNGSIPHQIHLQEMHAIIRRQAEFYPFLVENQDKIEKILTFRIPYYVGPLARGKSEFAWLNRKSDEKIRPWNFDEMVDKETSAENFITRMTNYDQYLPDQKVLPKHSLLYEKFAVYNELTKVRYVTEQGKSFFFDANMKQEIFDGVFKVYRKVTKEKLMDFLGKEFDEFRIVDLLGLDKDNKSFNASLGTYHDLKKIVSKDLLDNPENEDILENVVLTLTLFEDREMIRKRLEKYKDVLTEEQRKKLERRHYTGWGRLSAKLINGIRDKVTRKTILDYLIDDGTSNRNFMQLINDDTLSFVDEIRLAQGSGEAEDYRAEVQNLAGSPAIKKGILQSLKIVDELIEVMGYDPEHIVVEMARENQFTNQGRRNSQQRYKKIENAIKNLNSKILKEYPTNNQALQNDRLFLYYLQNGKDMYTDEELDIDQLSQYDIDHIIPQAFIKDDSLDNKVLTKSAKNRGKSDDVPSLEIVHKKKNFWKQLLDSQLISQRKFDNLTKAERGGLTNEDKARFIQRQLVETRQITKHVARILDTRFNTKLDEAGNRIRDPKVNIITLKSNLVSQFRKDYQLYKVREINNYHHAHDAYLNAVVATALLKKYPQLAPEFVYGDYPKYNSYKSRKATEKVLFYSNIMNFFRRVLVYSKTGEVRIRPVIEVNKETGEIVWDKKSDFRTVRKVLSYPQVNVVKKVEMQTGGFSKESILQHGDSDKLIPRKTEKFYLDTKKYGGFDSPTIAYSVLLIADIEKGKAKKLKRVKELIGITIMERMAFEKNPIEFLEHKGYKNILEKNIIKLPKYSLFELENGRRRLLASAKELQKGNEMILPPHLVTLLYHSSNIHKITEPIHLNYVNKNKHEFKELLRHISDFSTRYILAQDRLSKIEELYDKNDGDDISDLTSSFVNLLTFTAIGAPAAFKFLGSVIDRKRYTSIAEILEATLIHQSVTGLYETRIDLSKLGGD

SEQ ID NO: 189 - protein, 1359 aa, Streptococcus suis
MKKKYAIGIDIGTNSVGWSVVTDDYKVPSKKMKVFGNTEKRYIKKNLLGTLLFDEGNTAENRRLKRTARRRYTRRRNRILYLQEIFAEEINKIDDSFFQRLDDSFLIVEDKQGSKHPIFGTLQEEKKYHKQFPTIYHLRKQLADSSQKADIRLIYLALAHIIKYRGHFLFEGDLKSENKDVQHLFNDFVEMFDKTVEGSYLSENLPNVADVLVEKVSKSRRLENILHYFPNEKKNGLFGNFLALALGLQPNFKTNFELAEDAKIQFSKETYEEDLEELLGKIGDDYADLFIATKSLYDGILLAGILSTTDSTTKAPLSSSMVNRYEEHKKDLALLKNFIHQNLSDSYKEVFNDKLKDGYAGYIEGKTTQENFYRFIKKAIEKIEGSDYFIDKIDREDFLRKQRTFDNGSIPHQIHLQEMHAIIRRQAEFYPFLVENQDKIEKILTFRIPYYVGPLARGKSEFAWLNRKSDEKIRPWNFDEMVDKETSAENFITRMTNYDQYLPDQKVLPKHSLLYEKFAVYNELTKVKFIAEGMRDYQFLDSGQKKDIVKTLFKTKRKVTAKDIKAYLENSNGYAGVELKGLEEQFNASLPTYHDLLKILRDKAFIDAEENQEILEDIVLTLTLFEDREMIRKRLEKYKDILTEEQRKKLERRHYTGWGRLSAKLINGILDKVTRKTILGYLIDDGTSNRNFMQLINDDTLSFVDEIRLAQGSGEAEDYRAEVQNLAGSPAIKKGILQSLKIVDELIEVMGYDPEHIVVEMARENQFTNQGRRNSQQRYKKIENAIKNLNSKILKEYPTNNQALQNDRLFLYYLQNGKDMYTDEELDIDQLSQYDIDHIIPQAFIKDDSLDNKVLTKSAKNRGKSDDVPSLEIVHKKKNFWKQLLDSQLISQRKFDNLTKAERGGLTNEDKARFIQRQLVETRQITKHVARILDTRFNTKLDEAGNRIRDPKVNIITLKSNLVSQFRKDYQLYKVREINNYHHAHDAYLNAVVATALLKKYPQLAPEFVYGDYPKYNSYKSRKATEKVLFYSNIMNFFRRVLVYSKTGEVRIRPVIEVNKETGEIVWDKKSDFKTVRKVLSYPQVNVVKKVEMQTGGFSKESILQHGDSDKLIPRKTEKFYLDTKKYGGFDSPTIAYSVLLIADIEKGKAKKLKRVKELIGITIMERMAFEKNPIEFLEHKGYKNILEKNIIKLPKYSLFELENGRRRLLASAKELQKGNEMILPPHLVTLLYHSSNIHKITEPIHLNYVNKNKHEFKELLRHISDFSTRYILAQDRLSKIEELYDKNDGDDISDLTSSFVNLLTFTAIGAPAAFKFLGSVIDRKRYTSIAEILEATLIHQSVTGLYETRIDLSKLGGD

SEQ ID NO: 190 - protein, 1351 aa, Streptococcus suis
MDQKYSIGLDIGTNSVGWAVVTDDYKVPAKKMKVLGNTDKQSIKKNLLGALLFDSGETAEATRLKRTARRRYTRRRNRLRYLQEIFAEEMNKVDENFFQRLDDSFLVDEDKRGERHPIFGNIAAEVKYHDDFPTIYHLRKHLADISQKADLRLVYLALAHMIKFRGHFLIEGQLKAENTNVQALFKDFVEVYDKTVEESHLSEMTVDALSILTEKVSKSRRLENLIAHYPAEKKNTLFGNLIALSLGLQPNFKTNFQLSEDAKLQFSKDTYEEDLEGLLGEIGDEYADLFASAKNLYDAILLSGILTVDDNSTKAPLSASMVKRYEEHQKDLKKLKDFIKVNAPDQYNAIFKDKNKKGYAGYIENGVKQDEFYKYLKGILLQINGSGDFLDKIDREDFLRKQRTFDNGSIPHQIHLQEMHAILRRQEEHYPFLKENQDKIEKILTFRIPYYVGPLARKGSRFAWAEYKADEKITPWNFDDILDKEKSAEKFITRMTLNDLYLPEEKVLPKHSLLYETFTVYNELTKVKYVNEQGEAKFFDANMKQEIFDHVFKENRKVTKDKLLNYLGKEFDEFRIVDLTGLDKENKVFNSSLGTYHDLRKILDKSFLDNKENEQIIEDIIQTLTLFEDREMIRQRLQKYSDIFTKAQLKKLERCHYTGWGRLSYKLINGIRNKENKKTILDYLIDDGYANRNFMQLINDDALSFKEEIAKAQVIGETDDLNQVVSDIAGSPAIKKGILQSLKIVDELVKVMGYNPANIVIEMARENQTTDKGRRNSQQRLKLLQDSLKPVNIKNVENQQLQNDRLFLYYIQNGKDMYTGETLDINNLSQYDIDHIIPQAFIKDDSFDNRVLTSSSENRGKSDNVPSIEVVRARKADWMRLRKAGLISQRKFDNLTKAERGGLTENDKAGFIKRQLVETRQITKHVAQVLDARFNAKHDENKKVIRDVKIITLKSNLVSQFRKDFKFYKVREINDYHHAHDAYLNAVIGTALLKKYPKLASEFVYGEFKKYDVSDKEIGKATAKYFFYSNLMNFFKKEVKFADGTVVERPDIETSEDGEIAWNKQTDFKIVRKVLSYPQVNIVKKTEVQTHGLDRPSPKPKPDSSENLVGVKRNLDPKKYGGYAGISNSYAVLVKAIIEKGVKKKETMVLEFQGISILDRITFEKDKRAFLLGKGYKDIKKIIELPKYSLFELKDGSRRMLASRGEIHKGNELFVPQKFTTLLYHAKRINNPINKDHIEYVKKHRDDFKELLNYVLEFNEKYVGATKNGERLKEAVADFDSKSNEEICTSFLGLFELTSLGSASDFEFLGVKIPRYRDYTPSSLLKDSTLIHQSITGLYETRIDLSKLGED

SEQ ID NO: 191 - protein, 1256 aa, Brochothrix thermosphacta
MWGVSLFEAGKTAAERRGYRSTRRRLNHRKFRLRLLEDMFEKEILSKDPSFFIRLKEAFLSPKDEQKQFLFNDKDYTDADYYEQYKTIYHLRYDLISQHRQFDIREVYLAIHHLIKYRGHFIYEDQTFTTDGNQLQHHIKAIITMINSTLNRIIPETIDINVFEKILLDRMMNRSSKVKFLIELTGKQDKPLLKELFNLIVGLKAKPASIFEQENLATIVETMNMSTEQVQLDLLTLADVLADEEYDLLLTAQKIYSAIILDESMDGYEYFAEAKKESYRKHQEELVLVKKMLKSNAITNDERAKFEYFYTDYIGYEESKSKEERLFKHIELLLAKENVLTTVEHALLEKNITFASLLPLQRSSRNAVIPYQVHEKELVAILENQATYYPFLLEQKDNIHKLLTFRIPYYVGPLADQKDSEFAWMVRKQAGKITPFNFEEMVDIDASSEAFIKRMTNKCTYLIHEDVIPKHSFSYAKFEVLNELNKIRLDGKPIDIPLKKRIFEGLFLEKTKVTQTSLKKWLAEHEHMTVSVVQGTQKETEFATSLQAFHRFVKIFDRETVSNPANEEMFEKIIYWSTVFEDKKIMRRKLSEYPQLTEQQQVQLAQVRFRGWGRLSQRLINRIKTPEDHKLSINEILQTNENFMQIIRNKDYLFKKIIEEQFENETALLNKQRIDELAASPANKKGIWQAIKIVKELEKVLQQPAENIFIEFARSDEESKRSTPRDKFIEKAYAETDTEHLKELKQRSKQLSSQRLFLYFIQNGKCMYSGEHLDIERLDSYEVDHILPQSYIKDNSIENLALVKKVENQRKKDSLLLNSSIINQNYSRWEQLKNAGLIGEKKFRNLTRTKITDRDKEGFIARQLVETRQITKHVTQLLQQEYKDTTKVFAIKATLVSGLRRKFEFIKNRNVNDYHHAQDAFLVAFLGTNITSNYPKIEMEYLFKGYQHYLNEVGKAAKPKFTFIVENLSKQQNSTTGEVKWNPEVDIAKLKRILNFKQCNIVRKVEEQSGALFKETIYPVEESSSKTIPLKKHLDTAIYGGYTAVNYASYALIQFKKGRKLKREIIGIPLAVQTRIDNSETSLQAYIAEQIKSEVEILNGRILKYQLISNNGNRLYIAGSERHNARQLIVSDEAAKVIWLISTKQADEAMFLKYYRLEHLEAVFEELIRKQAADYQIFEKLIKKIEVNFYSCTYNEKVKVIELLKITQANATNGDLKLLKMSNREGRLGSVSVALDFKIINQSVTGLYQSIEDYNN

SEQ ID NO: 192 - protein, 1290 aa, Catenibacterium mitsuokai
IVDYCIGLDLGTGSVGWAVVDMNHRLMKRNGKHLWGSRLFSNAETAANRRASRSIRRRYNKRRERIRLLRAILQDMVLEKDPTFFIRLEHTSFLDEEDKAKYLGDNYNLFIDEDFNDYTYYHKYPTIYHLRKALCESTEKADPRLIYLALHHIVKYRGNFLYEGQKFNMDASNIEDKLSDIFTQFTSFNNIPYEDDKKNLEILEILKKPLSKKAKVDEVMTLIAPEKDYKSAFKELVTGIAGNKMNVTKMILCEPIKQGDSEIKLKFSDSNYDDQFSEVEKDLGEYVEFVDALHNVYSWVELQTIMGATHTDNASISEAMVSRYNKHHDDLKLLKDCIKNNVPNKYFDMFRNDSEKSKGYYNYINRKAPVDEFYKYVKKCIEKVDTPEAKQILNDIELENFLLKQNSRTNGSVPYQMQLDEMIKIIDNQAEYYPILKEKREQLLSILTFRIPYYFGPLETSEHAWIKRLEGKENQRILPWNYQDIVDVDATAEGFIKRMRSYCTYFPDEEVLPKNSLIVSKYEVYNELNKIRVDDKLLEVDVKNDIYNELFMKNKTVTEKKLKNWLVNNQCCSKDAEIKGFQKENQFSTSLTPWIDFTNIFGKIDQSNFDLIENIIYDLTVFEDKKIMKRRLKKKYALPDDKVKQILKLKYKDWSRLSKKLLDGIVADSVTVLDVLESRLNLMEIINDKDLGYAQMIEEATSCPEDGKFTYEEVERLAGSPALKRGIWQSLQIVEEITKVMKCRPKYIYIEFERSEEKERTESKIKKLENVYKDEQTSVLEELKGFDNTKKISSDSLFLYFTQLGKCMYSGKKLDIDSLDKYQIDHIVPQSLVKDDSFDNRVLVVPSENQRKLDDLVVPFDIRDKMYRFWKLLFDHELISPKKFYSLIKTEYTERDEERFINRQLVETRQITKNVTQIIEDHYSTTKVAAIRANLSHEFRVKNHIYKNRDINDYHHAHDAYIVALIGGFMRDRYPNMHDSKAVYSEYMKMFRNKNDQKGFVINSMNYPYEVDGKLIWNPDLINEIKKCFYYKDCYCTTKLDQKSGQLFNTVLSNDAHADKGAVVPVNKNRSDVHKYGGFSGLQYTIVAIEGQKKKGKKTELVKKISGVPLHLKAASINEKINYIEEKEGLSDVRIIKDNIPVNQMIEMDGGEYLLTSEYVNARQLVLNEKQCALIADIYNAIYKQDYDNLDDILMIQLYIELTNKMKVLYPAYRGIAEKFESYVVISKEEKANIIQMLIVMHRGPQNGNIVYDDFKISDRIGRLKTKNHNLNIVFISQSPTGIYTKKYKL

SEQ ID NO: 193 - protein, 1359 aa, Artificial Sequence; identical to SEQ ID NO: 11
  Synthetic Polypeptide

SEQ ID NO: 194 - protein, 1313 aa, Clostridiales bacterium S5-A11
MKNYTIGLDIGTNSVGWAVIKDDLTLVRKKIKISGNTDKKEVKKNLWGSFLFEQGDTAQDTRVKRIARRRYERRRFRIRELQKIFDKSMGEVDSNFFHRLDESFLVEEDKEYSKYPIFSNEKEDKNYYDKYPTIYHLRKDLADSNQKADLRLIYLALAHMIKYRGHFLIEGDLKMDGISISESFQEFIDSYNEVCALEDENNDELLTQIENIFKQDISRSKKLDQAIALFQGKRQSLFGIFLTLIVGNKANFQKIFNLEDDIKLDLKEEDYDENLEELLSNIDEGYRDVFLQAKNVYNAIELSKILKTDGKETKAPLSAQMVELYNQHREDLKKYKDYIKAYLPEKYGETFKDATKNGYAGYIDGKTSQEDFYKFVKAQLKGEENGEYFLEAIENENFLRKQRSFYNGVIPYQIHLQELTAVLDQQEKHYSFLKENRDKIISLLTFRIPYYVGPLAKGESRFAWLERSNSEEKIKPWNFDKIVDIDKSAELFIENLTSRDTYLPDEPVLPKRSLIYQKFTIFNELTKISYIDERGILQNFSSREKIAIFNDLFKNKSKVTKNQLVKYIENKEQIIAPEIKGIEDSFNSNYSTYIDLDMKLLEKDEDEILEEIIKILTIFEDRKMRKRQLMKFKDKLSEKAINQLSKKHYTGWGQLSEKLINGIRDEQSNKTILDYLIDNGCPKNMNRNFMQLINDDTLSFKEKIRKAQDINQVNDIKEIVKDLPGSPAIKKGIYQSIRIVDEIIRKMKDRPKNIVIEMARENQTTQEGKNKSKARLKKIQEGLENLDSHVEKQALDEEMLKSPKYYLYCLQNGKDIYTGKDLDIGQLQTYDIDHIIPRSFITDNSFDNLVLTSSTVNRGKLDNVPSPDIVRQQKGFWKQLLRAGLMSQRKFNNLTKGKLTDRDRQQFINRQLVETRQITKHVANLLSHHLNEKKEVGEINIVLLKSALTSQFRKKFDFYKVREVNDYHHAHDAYLNGVIALKLLELYPYMAKDLIYGKYSYHRKGDKATQAKYKMSNIIERFSQDLLANPDGEIAWEKDKDLNTIRKVLSSKQINIIKKAEEGKGRLFKETINSRPSKKTEKRIPIKNNLDPNIYGGYIEEKMAYYIAINYLENGKTKKAIVGISIKDKKDFEGQTTEYLGKIGFNKASIINSFKNYTLFELENGSRRMIVGKGELQKGNQMYLPQNLLEFVYHLKHYNEDETSHKFIVEHKAYFDELLNYIVEFANKYLELENSIEKIKDLYHGKGPDVEEKELVESFINLLAITKCGPAADITFLGEKISRKRYRSTNCLWGSEVIFQSPTGLYETRLRLE

SEQ ID NO: 195 - protein, 1359 aa, Artificial Sequence; identical to SEQ ID NO: 11
  Synthetic Polypeptide

SEQ ID NO: 196 - protein, 1327 aa, Dolosigranulum pigrum
MQKNYTIGLDIGTNSVGWAVMKDDYTLIRKRMKVLGNTDIKKIKKNFWGVRLFDEGETAKETRLKRGTRRRYQRRRNRLIYLQDIFQQPMLAIDENFFHRLDDSFFVPDDKSYDRHPIFGSLEEEVAYHNTYPTIYHLRKHLADNPEKADLRLVYTALAHIVKYRGHFLIEGELNTENTSISETFEQFLDTYSDIFKEQLVGDISKVEEILSSKQSRSRKHEQIMALFPNENKLGNFGRFMMLIVGNTSNFKPVFDLDDEYKLKLSDETYEEDLDTLLGMTDDVFLDVFMAAKNVYDAVEMSAIISTDTGNSKAVLSNQMINFYDEHKVDLAQLKQFFKTHLPDKYYECFSDPSKNGYAGYIDGKTNQEDFYKYIEKVMKTIKSDKKDYFLDKIDREVFLRKQRSFYNSVIPHQIHLQEMQAILDRQSQYYPFLAENRDKIESLVTFRIPYYVGPLTVSDQSEFAWMERQSDEPIRPWNFDEIVNKERSAEKFIERMTNMDTYLLEEKVLPKRSLLYQTFEVYNELTKVRYTNEQGKTEKLNRQQKAEIIETLFKQKNRVREKDIANYLEQYGYVDGTDIKGVEDKFNASLSTYNDLAKIDGAKAYLDDPEYADVWEDIIKILTIFEDKAMRKKQLQTYSDTLSPEILKKLERKHYTGWGRFSKKLINGLRDEGSNKTILDYLKDEGSSGPTNRNFMQLIRDNTLSFKKKIEDAQTIEDTTHIYDTVAELPGSPAIKKGIRQALKIVEEIIDIIGYEPENIVVEMARESQTTKKGKDLSKERLEKLTEAIKEFDGVKVKDLKNENLRNDRLYLYYLQNGRDMYTNEPLDINNLSKYDIDHIIPQSFTTDNSIDNKVLVSRTKNQGNKSDDVPSINIVHKMKPFWRQLHKAGLISDRKFKNLTKAEHGGLTEADRAHFLNRQLVETRQITKHVANLLDSQYNTAEEQRINIVLLKSSMTSRFRKEFKLYKVREINDYHHGHDAYLNAVVATTIMKVYPNLKPQFVYGQYKKTSMFKEEKATARKHFYSNITKFFKKEKVVNEETGEILWDTERHLSTIKRVLSWKQMNIVKKVEKQKGQLWKETIYPKGDSSKLIPVKEGMDPQKYGGLSQVSEAFAVVITHEKGKKKQLKSDLISIPIVDQKAYEQHPTAYLEEAGYNNPTVLHELFKYQLFELEDGSRRMIASAKEFQKGNQMVLPLELVELLYHANRYDKVKFPDSIEYVHDNLAKFDDLLEYVIDFSNKYINADKNVQKIQKIYKEHGTEDVELTVESFVNLMTFTAMGAPATFKFYGESITRSRYTSITEFRGSTLIFQSITGLYETRYKLED

SEQ ID NO: 197 - protein, 1329 aa, Artificial Sequence
  Synthetic Polypeptide
MKKDYVIGLDIGTNSVGWAVMTEDYQLVKKKMPIYGNTEKKKIKKNFWGVRLFEEGHTAEDRRLKRTARRRISRRRNRLRYLQAFFEEAMTDLDENFFARLQESFLVPEDKKWHRHPIFAKLEDEVAYHETYPTIYHLRKKLADSSEQADLRLIYLALAHIVKYRGHFLIEGKLSTENISVKEQFQQFMIIYNQTFVNGESPLPESVLIEEELTEKASRTKKSEKVLQQFPQEKANGLFGQFLKLMVGNKADFKKVFGLEEEAKITYASESYEEDLEGILAKVGDEYSDVFLAAKNVYDAVELSTILADSDKKSHAKLSSSMIVRFTEHQEDLKKFKRFIRENCPDEYDNLFKNEQKDGYAGYIAHAVSQLKFYQYVKKIIQDIAGAEYFLEKIAQENFLRKQRTFDNGVIPHQIHLAELQAIIHRQAAYYPFLKENQEKIEQLVTFRIPYYVGPLSKGDASTFAWLKRQSEEPIRPWNLQETVDLDQSATAFIERMTNFDTYLPSEKVLPKHSLLYEKFMVFNELTKISYTDDRGIKANFSGKEKEKIFDYLFKTRRKVKKKDIIQFYRNEYNTEIVTLSGLEEDQFNASFSTYQDLLKCGLTRAELDHPDNAEKLEDIIKILTIFEDRQRIRTQLSTFKGQFSAEVLKKLERKHYTGWGRLSKKLINGIYDKESGKTILGYLIDDGVSKHYNRNFMQLINDSQLSFKNAIQKAQSSEHEETLSETVNELAGSPAIKKGIYQSLKIVDELVAIMGYAPKRIVVEMARENQTTSTGKRRSIQRLKIVEKAMAEIGSNLLKEQPTTNEQLRDTRLFLYYMQNGKDMYTGDELSLHRLSHYDIDHIIPQSFMKDDSLDNLVLVGSTENRGKSDDVPSKEVVKDMKAYWEKLYAAGLISQRKFQRLTKGEQGGLTLEDKAHFIQRQLVETRQITKNVAGILDQRYNANSKEKKVQIITLKASLTSQFRSIFGLYKVREVNDYHHGQDAYLNCVVATTLLKVYPNLAPEFVYGEYPKFQTFKENKATAKAIIYTNLLRFFTEDEPRFTKDGEILWSNSYLKTIKKELNYHQMNIVKKVEVQKGGFSKESIKPKGPSNKLIPVKNGLDPQKYGGFDSPIVAYTVLFTHEKGKKPLIKQEILGITIMEKTRFEQNPILFLEEKGFLRPRVLMKLPKYTLYEFPEGRRRLLASAKEAQKGNQMVLPEHLLTLLYHAKQCLLPNQSESLAYVEQHQPEFQEILERVVDFAEVHTLAKSKVQQIVKLFEANQTADVKEIAASFIQLMQFNAMGAPSTFKFFQKDIERARYTSIKEIFDATIIYQSTTGLYETRRKVVD

SEQ ID NO: 198 - protein, 1280 aa, Artificial Sequence
  Synthetic Polypeptide
MRLFEEGHTAEDRRLKRTARRRISRRRNRLRYLQAFFEEAMTDLDENFFARLQESFLVPEDKKWHRHPIFAKLEDEVAYHETYPTIYHLRKKLADSSEQADLRLIYLALAHIVKYRGHFLIEGKLSTENTSVKDQFQQFMVIYNQTFVNGESPLPESVLIEEELTEKASRTKKSEKVLQQFPQEKANGLFGQFLKLMVGNKADFKKVFGLEEEAKITYASESYEEDLEGILAKVGDEYSDVFLAAKNVYDAVELSTILADSDKKSHAKLSSSMIVRFTEHQEDLKKFKRFIRENCPDEYDNLFKNEQKDGYAGYIAHAVSQLKFYQYVKKIIQDIAGAEYFLEKIAQENFLRKQRTFDNGVIPHQIHLAELQAIIHRQAAYYPFLKENQEKIEQLVTFRIPYYVGPLSKGDASTFAWLKRQSEEPIRPWNLQETVDLDQSATAFIERMTNFDTYLPSEKVLPKHSLLYEKFMVFNELTKISYTDDRGIKANFSGKEKEKIFDYLFKTRRKVKKKDIIQFYRNEYNTEIVTLSGLEEDQFNASFSTYQDLLKCGLTRAELDHPDNAEKLEDIIKILTIFEDRQRIRTQLSTFKGQFSAEVLKKLERKHYTGWGRLSKKLINGIYDKESGKTILDYLVDDGVSKHYNRNFMQLINDSQLSFKNAIQKAQSSEHEETLSETVNELAGSPAIKKGIYQSLKIVDELVAIMGYAPKRIVVEMARENQTTSTGKRRSIQRLKIVEKAMAEIGSNLLKEQPTTNEQLRDTRLFLYYMQNGKDMYTGDELSLHRLSHYDIDHIIPQSFMKDDSLDNLVLVGSTENRGKSDDVPSKEVVKDMKAYWEKLYAAGLISQRKFQRLTKGEQGGLTLEDKAHFIQRQLVETRQITKNVAGILDQRYNAKSKEKKVQIITLKASLTSQFRSIFGLYKVREVNDYHHGQDAYLNCVVATTLLKVYPNLAPEFVYGEYPKFQTFKENKATAKAIIYTNLLRFFTEDEPRFTKDGEILWSNSYLKTIKKELNYHQMNIVKKVEVQKGGFSKESIKPKGPSNKLIPVKNGLDPQKYGGFDSPVVAYTVLFTHEKGKKPLIKQEILGITIMEKTRFEQNPILFLEEKGFLRPRVLMKLPKYTLYEFPEGRRRLLASAKEAQKGNQMVLPEHLLTLLYHAKQCLLPNQSESLAYVEQHQPEFQEILERVVDFAEVHTLAKSKVQQIVKLFEANQTADVKEIAASFIQLMQFNAMGAPSTFKFFQKDIERARYTSIKEIFDATIIYQSPTGLYETRRKVVD

SEQ ID NO: 199 - protein, 1072 aa, Enterococcus durans IPLA 655
MDEEAKIQLSKESYEEELESLLEKSGEEFRDVFLQAKKVYDAILLSDILSTKKQNSKAKLSLGMIERYDSHKKDLEELKQFVKANLPEKTAIFFKDSSKNGYAGYIDGKTTQEDFYKFLKKELNGIAGSERFMEKVDQENFLLKQRTTANGVIPHQVHLTELKAIIERQKPYYPSLEEARDKMIRLLTFRIPYYVGPLAQGEETSSFAWLERKTPEKVTPWNATEVIDYSASAMKFIQRMINYDTYLPTEKVLPKHSILYQKYTIFNELTKVAYKDERGIKHQFSSKEKREIFKELFQKQRKVTVKKLQQFLSANYNIEDAEILGVDKAFNSSYATYHDFLDLAKPNELLEQPEMNAMFEDIVKILTIFEDREMIRTQLKKYQSVLGDGFFKKLVKKHYTGWGRLSERLINGIRDKKTNKTILDYLIDDDFPYNRNRNFMQLINDDSLSFKEELANELALAGNQSLLEVVEALLGSPAIKKGIWQTLKIVEELIEIIGYNPKNIVVEMARENQRTNRSKPRLKALEEALKSFDSPLLKEQPVDNQALQKDRLYLYYLQNGKDMYTGEALDIDRLSEYDIDHIIPRSFIVDNSIDNKVLVSSKENRLKMDDVPDQKVVIRMRRYWEKLLRANLISERKFAYLTKLELTPEDKARFIQRQLVETRQITKHVAAILDQYFNQPEESKNKGIRIITLKSSLVSQFRKTFGINKVREINNHHHAHDAYLNGVVAIALLKKYPKLEPEFVYGNYTKFNLATENKATAKKEFYSNILRFFEKEEYSYDENGEIFWDKARHIPQIKKVISSHQVNIVKKVEVQTGGFYKETVNPKGKPDKLIQRKAGWDVSKYGGFGSPVVAYAVAFIYEKGKARKKAKAIEGITIMKQSLFEQDPIGFLSNKGYSNVTKFIKLSKYTLYELENGRRRMVASKEAQKANSFILPEKLVTLLYHAQHYDEIAHKESFDYVNDHLSEFREILDQVIDFSNRYTIAAKNTEKIAELFEQNQESTVQSLSQSFINLMQLNAMGAPADFKFFDVIIPRKRYPSLTEIWESTIIYQSITGLRETRTRMATLWDGEQ

SEQ ID NO: 200 - protein, 1329 aa, Enterococcus faecalis
MKKDYVIGLDIGTNSVGWAVMTEDYQLVKKKMPIYGNTEKKKIKKNFWGVRLFEEGHTAEDRRLKRTARRRISRRRNRLRYLQAFFEEAMTDLDENFFARLQESFLVPEDKKWHRHPIFAKLEDEVAYHETYPTIYHLRKKLADSSEQADLRLIYLALAHIVKYRGHFLIEGKLSTENTSVKEQFQQFMVIYNQTFVNGESPLPESVLIEEELTEKASRTKKSEKVLQQFPQEKANGLFGQFLKLMVGNKADFKKVFGLEEEAKITYASESYEEDLEGILAKVGDEYSDVFLAAKNVYDAVELSTILADSDKKSHAKLSSSMIVRFTEHQEDLKKFKRFIRENCPDEYDNLFKNEQKDGYAGYIAHAVSQLKFYQYVKKIIQDIAGAEYFLEKIAQENFLRKQRTFDNGVIPHQIHLAELQAIIHRQAAYYPFLKENQEKIEQLVTFRIPYYVGPLSKGDASTFAWLKRQSEEPIRPWNLQETVDLDQSATAFIERMTNFDTYLPSEKVLPKHSLLYEKFMVFNELTKISYTDDRGIKANFSGKEKEKIFDYLFKTRRKVKKKDIIQFYRNEYNTEIVTLSGLEEDQFNASFSTYQDLLKCGLTRAELDHPDNAEKLEDIIKILTIFEDRQRIRTQLSTFKGQFSAEVLKKLERKHYTGWGRLSKKLINGIYDKESGKTILDYLVDDGVSKHYNRNFMQLINDSQLSFKNAIQKAQSSEHEETLSETVNELAGSPAIKKGIYQSLKIVDELVAIMGYAPKRIVVEMARENQTTSTGKRRSIQRLKIVEKAMAEIGSNLLKEQPTTNEQLRDTRLFLYYMQNGKDMYTGDELSLHRLSHYDIDHIIPQSFMKDDSLDNLVLVGSTENRGKSDDVPSKKVVKKMKAYWEKLYAAGLISQRKFQRLTKGEQGGLTLEDKAHFIQRQLVETRQITKNVAGILDQRYNAKSKEKKVQIITLKASLTSQFRSIFGLYKVREVNDYHHGQDAYLNCVVATTLLKVYPNLAPEFVYGEYPKFQAFKENKATAKTIIYTNLMRFFTEDEPRFTKDSEILWSNSYLKTIKKELNYHQMNIVKKVEVQKGGFSKESIKPKGPSNKLIPVKNGLDPQKYGGFDSPVVAYTVLFTHEKGKKPLIKQEILGITIMEKTRFEQNPILFLEEKGFLRPRVLMKLPKYTLYEFPEGRRRLLASAKEAQKGNQMVLPEHLLTLLYHAKQCLLPNQSESLAYVEQHQPEFQEILERVVDFAEVHTLAKSKVQQIVKLFEANQTADVKEIAASFIQLMQFNAMGAPSTFKFFQKDIERARYTSIKEIFDATIIYQSTTGLYETRRKVVD

SEQ ID NO: 201 - protein, 1329 aa, Enterococcus faecalis
MKKDYVIGLDIGTNSVGWAVMTEDYQLVKKKMPIYGNTEKKKIKKNFWGVRLFEEGHTAEDRRLKRTARRRISRRRNRLRYLQAFFEEAMTALDENFFARLQESFLVPEDKKWHRHPIFAKLEDEVAYHETYPTIYHLRKKLADSSEQADLRLIYLALAHIVKYRGHFLIEGKLSTENISVKEQFQQFMIIYNQTFVNGESPLPESVLIEEELTEKASRTKKSEKVLQQFPQEKANGLFGQFLKLMVGNKADFKKVFGLEEEAKITYASESYEEDLEGILAKVGDEYSDVFLAAKNVYDAVELSTILADSDKKSHAKLSSSMIVRFTEHQEDLKNFKRFIRENCPDEYDNLFKNEQKDGYAGYITHAVSQLKFYQYVKKIIQDIAGAEYFLEKIAQENFLRKQRTFDNGVIPHQIHLAELQAIIHRQAAYYPFLKENQEKIEQLVTFRIPYYVGPLSKGDANTFAWLKRQSEEPIRPWNLQETVDLDQSATAFIERMTNFDTYLPSEKVLPKHSLLYEKFMVFNELTKISYTDDRGIKANFSGKEKEKIFDYLFKTRRKVKKKDIIQFYRNEYNTEIVTLSGLEEDQFNASFSTYQDLLKCGLTRAELDHPDNAEKLEDIIKILTIFEDRQRIRTQLSTFKGQFSAEVLKKLERKHYTGWGRLSKKLINGIYDKESGKTILDYLIDDGVSKHYNRNFMQLINDSQLSFKNAIQKAQSSEHEETLSETVNELAGSPAIKKGIYQSLKIVDELVAIMGYAPKRIVVEMARENQTTSTGKRRSIQRLKIVEKAMAEIGSNLLKEQPTTNEQLRDTRLFLYYMQNGKDMYTGDELSLHRLSHYDIDHIIPQSFMKDDSLDNLVLVGSTENRGKSDDVPSKEVVKDMKAYWEKLYAAGLISQRKFQRLTKGEQGGLTLEDKAHFIQRQLVETRQITKNVAGILDQRYNAKSKEKKVQIITLKASLTSQFRSIFGLYKVREVNDYHHGQDAYLNCVVATTLLKVYPNLAPEFVYGEYPKFQTFKENKATAKAIIYTNLLRFFTEDEPRFTKDGEILWSNSYLKTIKKELNYHQMNIVKKVEVQKGGFSKESIKPKGPSNKLIPVKNGLDPQKYGGFDSPIVAYTVLFTHEKGKKPLIKQEILGITIMEKTRFEQNPILFLEEKGFLRPRVLMKLPKYTLYQFPEGRRRLLASAKEAQKGNQMVLPEHLLTLLYHAKQCLLPNQSESLAYVEQHQPEFQEILERVVDFAEVHTLAKSKVQQIVKLFEANQTADVKEIAASFIQLMQFNAMGAPSTFKFFQKDIERARYTSIKEIFDATIIYQSTTGLYETRRKVVD

SEQ ID NO: 202 - protein, 1329 aa, Enterococcus faecalis
MKKDYVIGLDIGTNSVGWAVMTEDYQLVKKKMPIYGNTEKKKIKKNFWGVRLFEEGHTAEDRRLKRTARRRISRRRNRLRYLQAFFEEAMTALDENFFARLQESFLVPEDKKWHRHPIFAKLEDEVAYHETYPTIYHLRKKLADSSEQADLRLIYLALAHIVKYRGHFLIEGKLSTENISVKEQFQQFMIIYNQTFVNGESPLPESVLIEEELTEKASRTKKSEKVLQQFPQEKANGLFGQFLKLMVGNKADFKKVFGLEEEAKITYASESYEEDLEGILAKVGDEYSDVFLAAKNVYDAVELSTILADSDKKSHAKLSSSMIVRFTEHQEDLKNFKRFIRENCPDEYDNLFKNEQKDGYAGYITHAVSQLKFYQYVKKIIQDIAGAEYFLEKIAQENFLRKQRTFDNGVIPHQIHLAELQAIIHRQAAYYPFLKENQEKIEQLVTFRIPYYVGPLSKGDASTFAWLKRQSEEPIRPWNLQETVDLDQSATAFIERMTNFDTYLPSEKVLPKHSLLYEKFMVFNELTKISYTDDRGIKANFSGKEKEKIFDYLFKTRRKVKKKDIIQFYRNEYNTEIVTLSGLEEDQFNASFSTYQDLLKCGLTRAELDHPDNAEKLEDIIKILTIFEDRQRIRTQLSTFKGQFSAEVLKKLERKHYTGWGRLSKKLINGIYDKESGKTILDYLVDDGVSKHYNRNFMQLINDSQLSFKNAIQKAQSSEHEETLSETVNELAGSPAIKKGIYQSLKIVDELVAIMGYAPKRIVVEMARENQTTSTGKRRSIQRLKIVEKAMAEIGSNLLKEQPTTNEQLRDTRLFLYYMQNGKDMYTGDELSLHRLSHYDIDHIIPQSFMKDDSLDNLVLVGSTENRGKSDDVPSKEVVKDMKAYWEKLYAAGLISQRKFQRLTKGEQGGLTLEDKAHFIQRQLVETRQITKNVAGILDQRYNAKSKEKKVQIITLKASLTSQFRSIFGLYKVREVNDYHHGQDAYLNCVVATTLLKVYPNLAPEFVYGEYPKFQTFKENKATAKAIIYTNLLRFFTEDEPRFTKDGEILWSNSYLKTIKKELNYHQMNIVKKVEVQKGGFSKESIKPKGPSNKLIPVKNGLDPQKYGGFDSPIVAYTVLFTHEKGKKPLIKQEILGITIMEKTRFEQNPILFLEEKGFLRPRVLMKLPKYTLYEFPEGRRRLLASAKEAQKGNQMVLPEHLLTLLYHAKQCLLPNQSESLAYVEQHQPEFQEILERVVDFAEVHTLAKSKVQQIVKLFEANQTADVKEIAASFIQLMQFNAMGAPSTFKFFQKDIERARYTSIKEIFDATIIYQSTTGLYETRRKVVD

SEQ ID NO: 203 - protein, 1329 aa, Enterococcus faecalis
MKKDYVIGLDIGTNSVGWAVMTEDYQLVKKKMPIYGNTEKKKIKKNFWGVRLFEEGHTAEDRRLKRTARRRISRRRNRLRYLQAFFEEAMTDLDENFFARLQESFLVPEDKKWHRHPIFAKLEDEVAYHETYPTIYHLRKKLADSSEQADLRLIYLALAHIVKYRGHFLIEGKLSTENISVKEQFQQFMIIYNQTFVNGESPLPESVLIEEELTEKASRTKKSEKVLQQFPQEKANGLFGQFLKLMVGNKADFKKVFGLEEEAKITYASESYEEDLEGILAKVGDEYSDVFLAAKNVYDAVELSTILADSDKKSHAKLSSSMIVRFTEHQEDLKKFKRFIRENCPDEYDNLFKNEQKDGYAGYIAHAVSQLKFYQYVKKIIQDIAGAEYFLEKIAQENFLRKQRTFDNGVIPHQIHLAELQAIIHRQAAYYPFLKENQEKIEQLVTFRIPYYVGPLSKGDASTFAWLKRQSEEPIRPWNLQETVDLDQSATAFIERMTNFDTYLPSEKVLPKHSLLYEKFMVFNELTKISYTDDRGIKANFSGKEKEKIFDYLFKTRRKVKKKDIIQFYRNEYNTEIVTLSGLEEDQFNASFSTYQDLLKCGLTRAELDHPDNAEKLEDIIKILTIFEDRQRIRTQLSTFKGQFSAEVLKKLERKHYTGWGRLSKKLINGIYDKESGKTILDYLVDDGVSKHYNRNFMQLINDSQLSFKNAIQKAQSSEHEETLSETVNELAGSPAIKKGIYQSLKIVDELVAIMGYAPKRIVVEMARENQTTSTGKRRSIQRLKIVEKAMAEIGSNLLKEQPTTNEQLRDTRLFLYYMQNGKDMYTGDELSLHRLSHYDIDHIIPQSFMKDDSLDNLVLVGSTENRGKSDDVPSKEVVKDMKAYWEKLYAAGLISQRKFQRLTKGEQGGLTLEDKAHFIQRQLVETRQITKNVAGILNQRYNANSKEKKVQIITLKASLTSQFRSIFGLYKVREVNDYHHGQDAYLNCVVATTLLKVYPNLAPEFVYGEYPKFQTFKENKATAKAIIYTNLLRFFTEDEPRFTKDGEILWSNSYLKTIKKELNYHQMNIVKKVEVQKGGFSKESIKPKGPSNKLIPVKNGLDPQKYGGFDSPVVAYTVLFTHEKGKKPLIKQEILGITIMEKTRFEQNPILFLEEKGFLRPRVLMKLPKYTLYEFPEGRRRLLASAKEAQKGNQMVLPEHLLTLLYHAKQCLLPNQSESLAYVEQHQPEFQEILERVVDFAEVHTLAKSKVQQIVKLFEANQTADVKEIAASFIQLMQFNAMGAPSTFKFFQKDIERARYTSIKEIFDATIIYQSTTGLYETRRKVVD

SEQ ID NO: 204 - protein, 1331 aa, Enterococcus faecalis
MKKDYVIGLDIGTNSVGWAVMTEDYQLVKKKMPIYGNTEKKKIKKNFWGVRLFEEGHTAEDRRLKRTARRRISRRRNRLRYLQAFFEEAMTALDENFFARLQESFLVPEDKKWHRHPIFAKLEDEVAYHETYPTIYHLRKKLADSSEQADLRLIYLALAHIVKYRGHFLIEGKLSTENISVKEQFQQFMIIYNQTFVNGESPLPESVLIEEELTEKASRTKKSEKVLQQFPQEKANGLFGQFLKLMVGNKADFKKVFGLEEEAKIKITYASESYEEDLEGILAKVGDEYSDVFLAAKNVYDAVELSTILADSDKKSHAKLSSSMIVRFTEHQEDLKNFKRFIRENCPDEYDNLFKNEQKDGYAGYIAHAVSQLKFYQYVKKIIQDIAGAEYFLEKIAQENFLRKQRTFDNGVIPHQIHLAELQAIIHRQAAYYPFLKENQKKIEQLVTFRIPYYVGPLSKGDASTFAWLKRQSEEPIRPWNLQETVDLDQSATAFIERMTNFDTYLPSEKVLPKHSLLYEKFMVFNELTKISYTDDRGIKANFSGKEKEKIFDYLFKTRRKVKKKDIIQFYRNEYNTEIVTLSGLEEDQFNASFSTYQDLLKCGLTRAELDHPDNAEKLEDIIKILTIFEDRQRIRTQLSTFKGQFSEEVLKKLERKHYTGWGRLSKKLINGIYDKESGKTILDYLIDDGVSKHYNRNFMQLINDSQLSFKNAIQKAQSSEHEETLSETVNELAGSPAIKKGIYQSLKIVDELVAIMGYAPKRIVVEMARENQTTSTGKRRSIQRLKIVEKAMAEIGSNLLKEQPTTNEQLRDTRLFLYYMQNGKDMYTGDELSLHRLSHYDIDHIIPQSFMKDDSLDNLVLVGSTENRGKSDDVPSKEVVKKMKAYWEKLYAAGLISQRKFQRLTKGEQGGLTLEDKAHFIQRQLVETRQITKNVAGILDQRYNAKSKEKKVQIITLKASLTSQFRSIFGLYKVREVNDYHHGQDAYLNCVVATTLLKVYPNLAPEFVYGEYPKFQAFKENKATAKAIIYTNLLRFFTEDEPRFTKDGEILWSNSYLKTIKKELNYHQMNIVKKVEVQKGGFSKESIKPKGPSNKLIPVKNGLDPQKYGGFDSPVVAYTVLFTHEKGKKPLIKQEILGITIMEKTRFEQNPILFLEEKGFLRPRVLMKLPKYTLYEFPEGRRRLLASAKEAQKGNQMVLPEHLLTLLYHAKQCLLPNQSESLAYVEQHQPEFQEILERVVDFAEVHTLAKSKVQQIVKLFEANQTADVKEIAASFIQLMQFNAMGAPSTFKFFQKDIERARYTSIKEIFDATIIYQSTTGLYETRRKVVD

SEQ ID NO: 205 - protein, 1329 aa, Enterococcus faecalis
MKKDYVIGLDIGTNSVGWAVMTEDYQLVKKKMPIYGNTEKKKIKKNFWGVRLFEEGHTAEDRRLKRTARRRISRRRNRLRYLQAFFEEAMTALDENFFARLQESFLVPEDKKWHRHPIFAKLEDEVAYHETYPTIYHLRKKLADSSEQADLRLIYLALAHIVKYRGHFLIEGKLSTENISVKEQFQQFMIIYNQTFVNGESPLPESVLIEEELTEKASRTKKSEKVLQQFPQEKANGLFGQFLKLMVGNKADFKKVFGLEEEAKITYASESYEEDLEGILAKVGDEYSDVFLAAKNVYDAVELSTILADSDKKSHAKLSSSMIVRFTEHQEDLKKFKRFIRENCPDEYDNLFKNEQKDGYAGYIAHAVSQLKFYQYVKKIIQDIAGAEYFLEKIAQENFLRKQRTFDNGVIPHQIHLAELQAIIHRQAAYYPFLKENQEKIEQLVTFRIPYYVGPLSKGDASTFAWLKRQSEEPIRPWNLQETVDLDQSATAFIERMTNFDTYLPSEKVLPKHSLLYEKFMVFNELTKISYTDDRGIKANFSGKEKEKIFDYLFKTRRKVKKKDIIQFYRNEYNTEIVTLSGLEEDQFNASFSTYQDLLKCGLTRAELDHPDNAEKLEDIIKILTIFEDRQRIRTQLSTFKGQFSAEVLKKLERKHYTGWGRLSKKLINGIYDKESGKTILGYLIDDGVSKHYNRNFMQLINDSQLSFKNAIQKAQSSEHEETLSETVNELAGSPAIKKGIYQSLKIVDELVAIMGYAPKRIVVEMARENQTTSTGKRRSIQRLKIVEKAMAEIGSNLLKEQPTTNEQLRDTRLFLYYMQNGKDMYTGDELSLHRLSHYDIDHIIPQSFMKDDSLDNLVLVGSTENRGKSDDVPSKEVVKDMKAYWEKLYAAGLISQRKFQRLTKGEQGGLTLEDKAHFIQRQLVETRQITKNVAGILDQRYNAKSKEKKVQIITLKASLTSQFRSIFGLYKVREVNDYHHGQDAYLNCVVATTLLKVYPNLAPEFVYGEYPKFQTFKENKATAKAIIYTNLLRFFTEDEPRFTKDGEILWSNSYLKTIKKELNYHQMNIVKKVEVQKGGFSKESIKPKGPSNKLIPVKNGLDPQKYGGFDSPIVAYTVLFTHEKGKKPLIKQEILGITIMEKTRFEQNPILFLEEKGFLRPRVLMKLPKYTLYEFPEGRRRLLASAKEAQKGNQMVLPEHLLTLLYHAKQCLLPNQSESLAYVEQHQPEFQEILERVVDFAEVHTLAKSKVQQIVKLFEANQTADVKEIAASFIQLMQFNAMGAPSTFKFFQKDIERARYTSIKEIFDATIIYQSTTGLYETRRKVVD

SEQ ID NO: 206 - protein, 1329 aa, Enterococcus faecalis
MKKDYVIGLDIGSNSVGWAVMTEDYQLVKKKMPIYGNTEKKKIKKNFWGVRLFEEGHTAEDRRLKRTARRRISRRRNRLRYLQAFFEEAMTDLDENFFARLQESFLVPEDKKWHRHPIFAKLEDEVAYHETYPTIYHLRKKLADSSEQADLRLIYLALAHIVKYRGHFLIEGKLSTENTSVKDQFQQFMVIYNQTFVNGESPLPESVLIEEELTEKASRTKKSEKVLQQFPQEKANGLFGQFLKLMVGNKADFKKVFGLEEEAKITYASESYEEDLEGILAKVGDEYSDVFLAAKNVYDAVELSTILADSDKKSHAKLSSSMIVRFTEHQEDLKNFKRFIRENCPDEYDNLFKNEQKDGYAGYITHAVSQLKFYQYVKKIIQDIAGAEYFLEKIAQENFLRKQRTFDNGVIPHQIHLAELQAIIHRQAAYYPFLKENQEKIEQLVTFRIPYYVGPLSKGDASTFAWLKRQSEEPIRPWNLQETVDLDQSATAFIERMTNFDTYLPSEKVLPKHSLLYEKFMVFNELTKISYTDDRGIKANFSGKEKEKIFDYLFKTRRKVKKKDIIQFYRNEYNTEIVTLSGLEEDQFNASFSTYQDLLKCGLTRAELDHPDNAEKLEDIIKILTIFEDRQRIRTQLSTFKGQFSAEVLKKLERKHYTGWGRLSKKLINGIYDKESGKTILDYLIDDGVSKHYNRNFMQLINDSQLSFKNAIQKAQSSEHEETLSETVNELAGSPAIKKGIYQSLKIVDELVAIMGYAPKRIVVEMARENQTTSTGKRRSIQRLKIVEKAMAEIGSNLLKEQPTTNEQLRDTRLFLYYMQNGKDMYTGDELSLHRLSHYDIDHIIPQSFMKDDSLDNLVLVGSTENRGKSDDVPSKEVVKDMKAYWEKLYAAGLISQRKFQRLTKGEQGGLTLEDKAHFIQRQLVETRQITKNVAGILDQLYNAKSKEKKVQIITLKASLTSQFRSIFGLYKVREVNDYHHGQDAYLNCVVATTLLKVYPNLAPEFVYGEYPKFQTFKENKATAKTIIYTNLMRFFTEDEPRFTKDGEILWSNSYLKTIKKELNYHQMNIVKKVEVQKGGFSKESIKPKGPSNKLIPVKNGLDPQKYGGFDSPVVAYTVLFTHEKGKKPLIKQEILGITIMEKTRFEQNPILFLEEKGFLRPRVLMKLPKYTLYEFPEGRRRLLASAKEAQKGNQMVLPEHLLTLLYHAKQCLLPNQSESLAYVEQHQPEFQEILERVVDFAEVHTLAKSKVQQIVKLFEANQTADVKEIAASFIQLMQFNAMGAPSTFKFFQKDIERARYTSIKEIFDATIIYQSTTGLYETRRKVVD

SEQ ID NO: 207 - protein, 1329 aa, Enterococcus faecalis
MKKDYVIGLDIGTNSVGWAVMTEDYQLVKKKMPIYGNTEKKKIKKNFWGVRLFEEGHTAEDRRLKRTARRRISRRRNRLRYLQAFFEEAMTALDENFFARLQESFLVPEDKKWHRHPIFAKLEDEVAYHETYPTIYHLRKKLADSSEQADLRLIYLALAHIVKYRGHFLIEGKLSTENISVKEKFQQFMIIYNQTFVNGEGPLPESVLIEEELTEKASRTKKSEKVLQQFPQEKANGLFGQFLKLMVGNKADFKKVFGLEEEAKITYASESYEEDLEGILAKVGDEYSDVFLAAKNVYDAVELSTILADSDKKSYAKLSSSMIVRFTEHQEDLKKFKRFIRENCPDEYDNLFKNEQKDGYAGYIAHAVSQLKFYQYVKKIIQDIAGAEYFLEKIAQENFLRKQRTFDNGVIPHQIHLAELQAIIHRQAAYYPFLKENQEKIEQLVTFRIPYYVGPLSKGDASTFAWLKRQSEEPIRPWNLQETVDLDQSATAFIERMTNFDTYLPSEKVLPKHSLLYEKFMVFNELTKISYTDDRGIKANFSGKEKEKIFDYLFKTRRKVKKKDIIQFYRNEYNTEIVTLSGLEEDQFNASFSTYQDLLKCGLTRAELDHPDNAEKLEDIIKILTIFEDRQRIRTQLSTFKGQFSAEVLKKLERKHYTGWGRLSKKLINGIYDKESGKTILDYLVDDGVSKHYNRNFMQLINDSQLSFKNAIQKAQSSEHEETLSETVNELAGSPAIKKGIYQSLKIVDELVAIMGYAPKRIVVEMARENQTTSTGKRRSIQRLKIVEKAMAEIGSNLLKEQPTTNEQLRDTRLFLYYMQNGKDMYTGDELSLHRLSHYDIDHIIPQSFMKDDSLDNLVLVGSTENRGKSDDVPSKEVVKDMKAYWEKLYAAGLISQRKFQRLTKGEQGGLTLEDKAHFIQRQLVETRQITKNVAGILDQRYNAKSKEKKVQIITLKASLTSQFRSIFGLYKVREVNDYHHGQDAYLNCVVATTLLKVYPNLAPEFVYGEYPKFQTFKENKATAKAIIYTNLLRFFTEDEPRFTKDGEILWSNSYLKTIKKELNYHQMNIVKKVEVQKGGFSKESIKPKGPSNKLIPVKNGLDPQKYGGFDSPIVAYTVLFTHEKGKKPLIKQEILGITIMEKTRFEQNPILFLEEKGFLRPRVLMKLPKYTLYEFPEGRRRLLASAKEAQKGNQMVLPEHLLTLLYHAKQCLLPNQSESLAYVEQHQPEFQEILERVVDFAEVHTLAKSKVQQIVKLFEANQTADVKEIAASFIQLMQFNAMGAPSTFKFFQKDIERARYTSIKEIFDATIIYQSTTGLYETRRKVVD

SEQ ID NO: 208 - protein, 1329 aa, Enterococcus faecalis
MKKDYVIGLDIGTNSVGWAVMTEDYQLVKKKMPIYGNTEKKKIKKNFWGVRLFEEGHTAEDRRLKRTARRRISRRRNRLRYLQAFFEEAMTALDENFFARLQESFLVPEDKKWHRHPIFAKLEDEVAYHETYPTIYHLRKKLADSSEQADLRLIYLALAHIVKYRGHFLIEGKLSTENISVKDQFQQFMVIYNQTFVNGESPLPESVLIEEELTEKASRTKKSEKVLQQFPQEKANGLFGQFLKLMVGNKADFKKVFGLEEEAKITYASESYEEDLEGILAKVGDEYSDVFLAAKNVYDAVELSTILADSDKKSHAKLSSSMIVRFTEHQEDLKNFKRFIRENCPDEYDNLFKNEQKDGYAGYIAHAVSQLKFYQYVKKIIQDIAGAEYFLEKIAQENFLRKQRTFDNGVIPHQIHLAELQAIIHRQAAYYPFLKENQKKIEQLVTFRIPYYVGPLSKGDASTFAWLKRQSEEPIRPWNLQETVDLDQSATAFIERMTNFDTYLPSEKVLPKHSLLYEKFMVFNELTKISYTDDRGIKANFSGKEKEKIFDYLFKTRRKVKKKDIIQFYRNEYNTEIVTLSGLEEDQFNASFSTYQDLLKCGLTRAELDHPDNAEKLEDIIKILTIFEDRQRIRTQLSTFKGQFSAEVLKKLERKHYTGWGRLSKKLINGIYDKESGKTILDYLIDDGVSKHYNRNFMQLINDSQLSFKNAIQKAQSSEHEETLSETVNELAGSPAIKKGIYQSLKIVDELVAIMGYAPKRIVVEMARENQTTSTGKRRSIQRLKIVEKAMAEIGSNLLKEQPTTNEQLRDTRLFLYYMQNGKDMYTGDELSLHRLSHYDIDHIIPQSFMKDDSLDNLVLVGSTENRGKSDDVPSKEVVKKMKAYWEKLYAAGLISQRKFQRLTKGEQGGLTLEDKAHFIQRQLVETRQITKNVAGILDQRYNAKSKEKKVQIITLKASLTSQFRSIFGLYKVREVNDYHHGQDAYLNCVVATTLLKVYPNLAPEFVYGEYPKFQAFKENKAMAKAIIYTNLLRFFTEDEPRFTKDGEILWSNSYLKTIKKELNYHQMNIVKKVEVQKGGFSKESIKPKGPSNKLIPVKNGLDPQKYGGFDSPVVAYTVLFTHEKGKKPLIKQEILGITIMEKTRFEQNPILFLEEKGFLRPRVLMKLPKYTLYEFPEGRRRLLASAKEAQKGNQMVLPERLLTLLYHAKQCLLPNQSESLAYVEQHQPEFQEILERVVDFAEVHTLAKSKVQQIVKLFEANQTADVKEIAASFIQLMQFNAMGAPSTFKFFQKDIERARYTSIKEIFDATIIYQSTTGLYETRRKVVD

SEQ ID NO: 209 - protein, 1329 aa, Enterococcus faecalis
MKKDYVIGLDIGTNSVGWAVMTEDYQLVKKKMPIYGNTEKKKIKKNFWGVRLFEEGHTAEDRRLKRTARRRISRRRNRLRYLQAFFEEAMTALDENFFARLQESFLVPEDKKWHRHPIFAKLEDEVAYHETYPTIYHLRKKLADSSEQADLRLIYLALAHIVKYRGHFLIEGKLSTENISVKEQFQQFMIIYNQTFVNGESPLPESVLIEEELTEKASRTKKSEKVLQQFPQEKANGLFGQFLKLMVGNKADFKKVFGLEEEAKITYASESYEEDLEGILAKVGDEYSDVFLAAKNVYDAVELSTILADSDKKSHAKLSSSMIVRFTEHQEDLKKFKRFIRENCPDEYDNLFKNEQKDGYAGYIAHAVSQLKFYQYVKKIIQDIAGAEYFLEKIAQENFLRKQRTFDNGVIPHQIHLAELQAIIHRQAAYYPFLKENQEKIEQLVTFRIPYYVGPLSKGDASTFAWLKRQNEKPIRPWNLQETVDLDQSATAFIERMTNFDTYLPSEKVLPKHSLLYEKFMVFNELTKISYTDDRGIKANFSGKEKEKIFDYLFKTRRKVKKKDIIQFYRNEYNTEIVTLSGLEEDQFNASFSTYQDLLKCGLTRAELDHPDNAEKLEDIIKILTIFEDRQRIRTQLSTFKGQFSAEVLKKLERKHYTGWGRLSKKLINGIYDKESGKTILDYLIDDGVSKHYNRNFMQLINDSQLSFKNAIQKAQSSEHEETLSETVNELAGSPAIKKGIYQSLKIVDELVAIMGYAPKRIVVEMARENQTTSTGKRRSIQRLKIVEKAMAEIGSNLLKEQPTTNEQLRDTRLFLYYMQNGKDMYTGDELSLHRLSHYDIDHIIPQSFMKDDSLDNLVLVGSTENRGKSDDVPSKEVVKKMKAYWEKLYAAGLISQRKFQRLTKGEQGGLTLEDKAHFIQRQLVETRQITKNVAGILDQRYNAKSKEKKVQIITLKASLTSQFRSIFGLYKVREVNDYHHGQDAYLNCVVATTLLKVYPNLAPEFVYGEYPKFQAFKENKATAKAIIYTNLMRFFTEVEPRFTKDGEILWSNSYLKTIKKELNYHQMNIVKKVEVQKGGFSKESIKPKGPSNKLIPVKNGLDPQKYGGFDSPVVAYTVLFTHEKGKKPLIKQEILGITIMEKTKFEQNPILFLEEKGFLRPRVLMKLPKYTLYEFPEGRRRLLASAKEAQKGNQMVLPEHLLTLLYHAKQCLLPNQSESLAYVEQHQPEFQEILERVVDFAEVHTLAKSKVQQIVKLFETNQTADVKEIAASFIQLMQFNAMGAPSTFKFFQKDIERARYTSIKEIFDATIIYQSTTGLYETRRKVVD

SEQ ID NO: 210 - protein, 1329 aa, Enterococcus faecalis
MKKDYVIGLDIGTNSVGWAVMTEDYQLVKKKMPIYGNTEKKKIKKNFWGVRLFEEGHTAEDRRLKRTARRRISRRRNRLRYLQAFFEEAMTALDENFFARLQESFLVPEDKKWHRHPIFAKLEDEVAYHETYPTIYHLRKKLADSSEQADLRLIYLALAHIVKYRGHFLIEGKLSTENISVKEQFQQFMIIYNQTFVNGESPLPESVLIEEELTEKASRTKKSEKVLQQFPQEKANGLFGQFLKLMVGNKADFKKVFGLEEEAKITYASESYEEDLEGILAKVGDEYSDVFLAAKNVYDAVELSTILADSDKKSHAKLSSSMIVRFTEHQEDLKNFKRFIRENCPDEYDNLFKNEQKDGYAGYIAHAVSQLKFYQYVKKIIQDIAGAEYFLEKIAQENFLRKQRTFDNGVIPHQIHLAELQAIIHRQAAYYPFLKENQKKIEQLVTFRIPYYVGPLSKGDASTFAWLKRQSEEPIRPWNLQETVDLDQSATAFIERMTNFDTYLPSEKVLPKHSLLYEKFMVFNELTKISYTDDRGIKANFSGKEKEKIFDYLFKTRRKVKKKDIIQFYRNEYNTEIVTLSGLEEDQFNASFSTYQDLLKCGLTRAELDHPDNAEKLEDIIKILTIFEDRQRIRTQLSTFKGQFSEEVLKKLERKHYTGWGRLSKKLINGIYDKESGKTILDYLIDDGVSKHYNRNFMQLINDSQLSFKNAIQKAQSSEHEETLSETVNELAGSPAIKKGIYQSLKIVDELVAIMGYAPKRIVVEMARENQTTSTGKRRSIQRLKIVEKAMAEIGSNLLKEQPTTNEQLRDTRLFLYYMQNGKDMYTGDELSLHRLSHYDIDHIIPQSFMKDDSLDNLVLVGSTENRGKSDDVPSKEVVKKMKAYWEKLYAAGLISQRKFQRLTKGEQGGLTLEDKAHFIQRQLVETRQITKNVAGILDQRYNAKSKEKKVQIITLKASLTSQFRSIFGLYKVREVNDYHHGQDAYLNCVVATTLLKVYPNLAPEFVYGEYPKFQAFKENKATAKAIIYTNLLRFFTEDEPRFTKDGEILWSNSYLKTIKKELNYHQMNIVKKVEVQKGGFSKESIKPKGPSNKLIPVKNGLDPQKYGGFDSPVVAYTVLFTHEKGKKPLIKQEILGITIMEKTRFEQNPILFLEEKGFLRPRVLMKLPKYTLYEFPEGRRRLLASAKEAQKGNQMVLPEHLLTLLYHAKQCLLPNQSESLAYVEQHQPEFQEILERVVDFAEVHTLAKSKVQQIVKLFEANQTADVKEIAASFIQLMQFNAMGAPSTFKFFQKDIERARYTSIKEIFDATIIYQSTTGLYETRRKVVD

SEQ ID NO: 211 - protein, 1328 aa, Enterococcus faecium
MKKEYTIGLDIGTNSVGWSVLTDDYRLVSKKMKVAGNTEKSSTKKNFWGVRLFDEGQTAEARRSKRTARRRLARRRQRILELQKIFAPEILKIDEHFFARLNESFLVLDEKKQSRHPVFATIKQEKSYHQTYPTIYHLRQALADSSEKADIRLVYLAMAHLLKYRGHFLIEGELNTENSSVTETFRQFLSTYNQQFSEADKLDEAVDCSFVFTEKMSKTKKAETLLKYFPHEKSNGYLSQFIKLMVGNQGNFKNVFGLEEAKLQFSKETYEEDLEELLEKIGDDYIDLFVQAKNVYDAVLLSEILSDSTKNTRAKLSAGMIRRYDAHKEDLVLLKRFVKENLPKKYRAFFGDNSVNGYAGYIEGHATQEDFYKFVKKELTGIRGSEVFLTKIEQENFLRKQRTFDNGVIPHQIHLTELRAIIANQKKHYPFLKEEQEKLESLLTFKIPYYVGPLAKKQENSPFAWLIRKSEEKIKPWNLPEIVDMEGSAVRFIERMINTDMYMPHNKVLPKNSLLYQKFSIYNELTKVRYQDERGQMNYFSSIEKKEIFHELFEKNRKVTKKDLQEFLYLKYDIKHAELSGIEKAFNASYTTYHDFLTMSENKQWLEDPELASMFEEIIKTLTVFEDREMIKTRLSHHEATLGKHIIKKLTKKHYTGWGRLSKELIQGIRDKQSNKTILDYLIDDDFPHHRNRNFMQLINDDSLSFKKEIKKAQMITDTENLEEIVKELTGSPAIKKGILQSLKIVDEIVGIMGYEPANIVVEMARENQTTGRGLKSSRPRLKALEESLKDFGSQLLKEYPTDNSSLQKDRLYLYYLQNGRDMYTGAPLDIHRLSDYDIDHIIPRSFTTDNSIDNKVLVSSKENRLKKDDVPSEKVVKKMRSFWYDLYSSKLISKRKLDNLTKIKLTEEDKAGFIKRQLVETRQITKHVAGILHHRFNKAEDTNEPIRKVRIITLKSALVSQFRNRFGIYKVREINEYHHAHDAYLNGVVALALLKKYPQLAPEFVYGEYLKFNAHKANKATVKKEFYSNIMKFFESDTPVCDENGEIFWDKSKSIAQVKKVINHHHMNIVKKTEIQKGGFSKETVEPKKDSSKLLPRKNNWDPAKYGGLGSPNVAYTVAFTYEKGKARKRTNALEGITIMEREAFEQSPVLFLKNKGYEQAEIEMKLPKYALFELENGRKRMVASKEAQKANSFLLPEHLVTLLYHAKQYDEISHKESFDYVNEHHKEFSEVFARVLEFAGKYTLAEKNIEKLEKIYKENQTDDLAKLASSFVNLMQFNAMGAPADFKFFDVTIPRKRYTSLTEIWQSTIIHQSITGLYETRIRMGK

SEQ ID NO: 212 - protein, 1329 aa, Enterococcus faecium
MKKEYTIGLDIGTNSVGWSVLTDDYRLVSKKMKVAGNTEKSSTKKNFWGVRLFDEGQTAEARRSKRTARRRLARRRQRILELQKIFAPEILKIDEHFFARLNESFLVPDEKKQSRHPVFATIKQEKSYHQTYPTIYHLRQALADSSEKADIRLVYLAMAHLLKYRGHFLIEGELNTENSSVTETFRQFLSTYNQQFSEAGKLDEAVDCSFVFTEKMSKTKKAETLLKYFPHEKSNGYLSQFIKLMVGNQGNFKNVFGLEEEAKLQFSKETYEEDLEELLEKIGDDYIDLFVQAKNVYDAVLLSEILSDSTKNTRAKLSAGMIRRYDAHKEDLVLLKRFVKENLPKKYRAFFGDNSVNGYAGYIEGHATQEAFYKFVKKELTGIRGSEVFLTKIEQENFLRKQRTFDNGVIPHQIHLSELRAIIANQKKHYPFLKEEQEKLESLLTFKIPYYVGPLAKKQENSPFAWLIRKSEEKIKPWNLPEIVDMEGSAVRFIERMINTDMYMPHNKVLPKNSLLYQKFSIYNELTKVRYQDERGQMNYFSSIEKKEIFHELFEKNRKVTKKDLQEFLYLKYDIKHAELSGIEKAFNASYTTYHDFLTMSENKQWLEDPELASMFEEIIKTLTVFEDREMIKTRLSHHEATLGKHIIKKLTKKHYTGWGRLSKELIQGIRDKQSNKTILDYLIDDDFPHHRNRNFMQLINDDSLSFKKEIKKAQMITDTENLEEIVKELTGSPAIKKGILQSLKIVDEIVGIMGYEPANIVVEMARENQTTGRGLKSSRPRLKALEESLKDFGSQLLKEYPTDNSSLQKDRLYLYYLQNGRDMYTGAPLDIHRLSDYDIDHIIPRSFTTDNSIDNKVLVSSKENRLKKDDVPSEKVVKKMRSFWYDLYSSKLISKRKLDNLTKIKLTEEDKAGFIKRQLVETRQITKHVAGILHHRFNKAEDTNDPIRKVRIITLKSALVSQFRNRFGIYKVREINEYHHAHDAYLNGVVALALLKKYPQLAPEFVYGEYLKFNAHKANKATVKKEFYSNIMKFFESDTPVCDENGEIFWDKSKSIAQVKKVINHHHMNIVKKTEIQKGGFSKETVEPKKDSSKLLPRKNNWDPAKYGGLGSPNVAYTVAFTYEKGKARKRTNALEGITIMEREAFEQSPVLFLKNKGYEQAEIEMKLPKYALFELENGRKRMVASKEAQKANSFLLPEHLVTLLYHAKQYDEISHKESFDYVNEHHKEFSEVFARVLEFAGKYTLAEKNIEKLEKIYKENQTDDLAKLASSFVNLMQFNAMGAPADFKFFDVTIPRKRYTSLTEIWQSTIIHQSITGLYETRIRMGK

SEQ ID NO: 213 - protein, 1329 aa, Enterococcus faecium
MKKEYTIGLDIGTNSVGWSVLTDDYRLVSKKMKVAGNTEKSSTKKNFWGVRLFDEGQTAEARRSKRTARRRLARRRQRILELQKIFAPEILKIDEHFFARLNESFLVLDEKKQSRHPVFATIKQEKSYHQTYPTIYHLRQALADSSEKADIRLVYLAMAHLLKYRGHFLIEGELNTENSSVTETFRQFLSTYNQQFSEADKLDEAVDCSFVFTEKMSKTKKAETLLKYFPHEKSNGYLSQFIKLMVGNQGNFKNVFGLEEEAKLQFSKETYEEDLEELLEKIGDDYIDLFVQAKNVYDAVLLSEILSDSTKNTRAKLSAGMIRRYDAHKEDLVLLKRFVKENLPKKYRAFFGDNSVNGYAGYIEGHATQEDFYKFVKKELTGIRGSEVFLTKIEQENFLRKQRTFDNGVIPHQIHLTELRAIIANQKKHYPFLKEEQEKLESLLTFKIPYYVGPLAKKQENSPFAWLIRKSEEKIKPWNLPEIVDMEGSAVRFIERMNNTDMYIPHNKVLPKNSLLYQKFSIYNELTKVRYQDERGQMNYFSSIEKKEIFHELFEKNRKVTKKDLQEFLYLKYDIKHAELSGIEKAFNASYTTYHDFLTMSENKQWLEDPELASMFEEIIKTLTVFEDREMIKTRLSHHEATLGKHIIKKLTKKHYTGWGRLSKELIQGIRDKQSNKTILDYLIDDDFPHHRNRNFMQLINDDSLSFKKEIKKAQMITDTENLEEIVKELTGSPAIKKGILQSLKIVDEIVGIMGYEPANIVVEMARENQTTGRGLKSSRPRLKALEESLKDFGSQLLKEYPTDNSSLQKDRLYLYYLQNGRDMYTGAPLDIHRLSDYDIDHIIPRSFTTDNSIDNKVLVSSKENRLKKDDVPSEKVVKKMRSFWYDLYSSKLISKRKLDNLTKIKLTEEDKAGFIKRQLVETRQITKHVAGILHHRFNKAEDTNEPIRKVRIITLKSALVSQFRNRFGIYKVREINEYHHAHDAYLNGVVALALLKKYPQLAPEFVYGEYLKFNAHKANKATVKKEFYSNIMKFFESDTPVCDENGEIFWDKSKSIAQVKKVINHHHMNIVKKTEIQKGGFSKETVEPKKDSSKLLPRKNNWDPAKYGGLGSPNVAYTVAFTYEKGKARKRTNALEGITIMEREAFEQSPVLFLKNKGYEQAEIEMKLPKYALFELENGRKRMVASKEAQKANSFLLPEHLVTLLYHAKQYDEISHKESFDYVNEHHKEFSEVFARVLEFAGKYTLAEKNIEKLEKIYKENQTDDLAKLASSFVNLMQFNAMGAPADFKFFDVTIPRKRYTSLTEIWQSTIIHQSITGLYETRIRMGK

SEQ ID NO: 214 - protein, 1329 aa, Enterococcus faecium
MKKEYTIGLDIGTNSVGWSVLTDDYRLVSKKMKVAGNTEKSSTKKNFWGVRLFDEGQTAEARRSKRTARRRLARRRQRILELQKIFAPEILKIDEHFFARLNESFLVLDEKKQSRHPVFATIKQEKSYHQTYPTIYHLRQALADSSEKADIRLVYLAMAHLLKYRGHFLIEGELNTENSSVTETFRQFLSTYNQQFSEADKLDEAVDCSFVFTEKMSKTKKAETLLKYFPHEKSNGYLSQFIKLMVGNQGNFKNVFGLEEEAKLQFSKETYEEDLEELLEKIGDDYIDLFVQAKNVYDAVLLSEILSDSTKNTRAKLSAGMIRRYDAHKEDLVLLKRFVKENLPKKYRAFFGDNSVNGYAGYIEGHATQEDFYKFVKKELTGIRGSEVFLTKIEQENFLRKQRTFDNGVIPHQIHLTELRAIIANQKKHYPFLKEEQEKLESLLTFKIPYYVGPLAKKQENSPFAWLIRKSEEKIKPWNLPEIVDMEGSAVRFIERMINTDMYIPHNKVLPKNSLLYQKFSIYNELTKVRYQDERGQMNYFSSIEKKEIFHELFEKNRKVTKKDLQEFLYLKYDIKHAELSGIEKAFNASYTTYHDFLTMSENKQWLEDPELASMFEEIIKTLTVFEDREMIKTRLSHHEATLGKHIIKKLTKKHYTGWGRLSKELIQGIRDKQSNKTILDYLIDDDFPHHRNRNFMQLINDDSLSFKKEIKKAQMITDTENLEEIVKELTGSPAIKKGILQSLKIVDEIVGIMGYEPANIVVEMARENQTTGRGLKSSRPRLKALEESLKDFGSQLLKEYPTDNSSLQKDRLYLYYLQNGRDMYTGAPLDIHRLSDYDIDHIIPRSFTTDNSIDNKVLVSSKENRLKKDDVPSEKVVKKMRSFWYDLYSSKLISKRKLDNLTKIKLTEEDKAGFIKRQLVETRQITKHVAGILHHRFNKAEDTNEPIRKVRIITLKSALVSQFRNRFGIYKVREINEYHHAHDAYLNGVVALALLKKYPQLAPEFVYGEYLKFNAHKANKATVKKEFYSNIMKFFESDTPVCDENGEIFWDKSKSIAQVKKVINHHHMNIVKKTEIQKGGFSKETVEPKKDSSKLLPRKNNWDPAKYGGLGSPNVAYTVAFTYEKGKARKRTNALEGITIMEREAFEQSPVLFLKNKGYEQAEIEMKLPKYALFELENGRKRMVASKEAQKANSFLLPEHLVTLLYHAKQYDEISHKESFDYVNEHHKEFSEVFARVLEFAGKYTLAEKNIEKLEKIYKENQTDDLAKLASSFVNLMQFNAMGAPADFKFFDVTIPRKRYTSLTEIWQSTIIHQSITGLYETRIRMGK

SEQ ID NO: 215 - protein, 1328 aa, Enterococcus faecium
MKKEYTIGLDIGTNSVGWSVLTDDYRLVSKKMKVAGNTEKSSTKKNFWGVRLFDEGQTAEARRSKRTARRRLARRRQRILELQKIFAPEILKIDEHFFARLNESFLVLDEKKQSRHPVFATIKQEKSYHQTYPTIYHLRQALADSSEKADIRLVYLAMAHLLKYRGHFLIEGELNTENSSVTETFRQFLSTYNQQFSEADKLDEAVDCSFVFTEKMSKTKKAETLLKYFPHEKSNGYLSQFIKLMVGNQGNFKNVFGLEEAKLQFSKETYEEDLEELLEKIGDDYIDLFVQAKNVYDAVLLSEILSDSTKNTRAKLSAGMIRRYDAHKEDLVLLKRFVKENLPKKYRAFFGDNSVNGYAGYIEGHATQEDFYKFVKKELTGIRGSEVFLTKIEQENFLRKQRTFDNGVIPHQIHLTELRAIIANQKKHYPFLKEEQEKLESLLTFKIPYYVGPLAKKQENSPFAWLIRKSEEKIKPWNLPEIVDMEGSAVRFIERMINTDMYIPHNKVLPKNSLLYQKFSIYNELTKVRYQDERGQMNYFSSIEKKEIFHELFEKNRKVTKKDLQEFLYLKYDIKHAELSGIEKAFNASYTTYHDFLTMSENKQWLEDPELASMFEEIIKTLTVFEDREMIKTRLSHHEATLGKHIIKKLTKKHYTGWGRLSKELIQGIRDKQSNKTILDYLIDDDFPHHRNRNFMQLINDDSLSFKKEIKKAQMITDTENLEEIVKELTGSPAIKKGILQSLKIVDEIVGIMGYEPANIVVEMARENQTTGRGLKSSRPRLKALEESLKDFGSQLLKEYPTDNSSLQKDRLYLYYLQNGRDMYTGAPLDIHRLSDYDIDHIIPRSFTTDNSIDNKVLVSSKENRLKKDDVPSEKVVKKMRSFWYDLYSSKLISKRKLDNLTKIKLTEEDKAGFIKRQLVETRQITKHVAGILHHRFNKAEDTNEPIRKVRIITLKSALVSQFRNRFGIYKVREINEYHHAHDAYLNGVVALALLKKYPQLAPEFVYGEYLKFNAHKANKATVKKEFYSNIMKFFESDTPVCDENGEIFWDKSKSIAQVKKVINHHHMNIVKKTEIQKGGFSEETVEPKKDSSKLLPRKNNWDPAKYGGLGSPNVAYTVAFTYEKGKARKRTNALEGITIMEREAFEQSPVLFLKNKGYEQAEIEMKLPKYALFELENGRKRMVASKEAQKANSFLLPEHLVTLLYHAKQYDEISHKESFDYVNEHHKEFSEVFARVLEFAGKYTLAEKNIEKLEKIYKENQTDDLAKLASSFVNLMQFNAMGAPADFKFFDVTIPRKRYTSLTEIWQSTIIHQSITGLYETRIRMGK

SEQ ID NO: 216 - protein, 1329 aa, Enterococcus faecium
MKKEYTIGLDIGTNSVGWSVLTDDYRLVSKKMKVAGNTEKSSTKKNFWGVRLFDEGQTAEARRSKRTARRRLARRRQRILELQKIFAPEILKIDEHFFARLNESFLVLDEKKQSRHPVFATIKQEKSYHQTYPTIYHLRQALADSSEKADIRLVYLAMAHLLKYRGHFLIEGELNTENSSVTETFRQFLSTYNQQFSEADKLDEAVDCSFVFTEKMSKTKKAETLLKYFPHEKSNGYLSQFIKLMVGNQGNFKNVFGLEEEAKLQFSKETYEEDLEELLEKIGDDYIDLFVQAKNVYDAVLLSEILSDSTKNTRAKLSAGMIRRYDAHKEDLVLLKRFVKENLPKKYRAFFGDNSVNGYAGYIEGHATQEDFYKFVKKELTGIRGSEVFLTKIEQENFLRKQRTFDNGVIPHQIHLTELRAIIANQKKHYPFLKEEQEKLESLLTFKIPYYVGPLAKKQENSPFAWLIRKSEEKIKPWNLPEIVDMEGSAVRFIERMINTDMYMPHNKVLPKNSLLYQKFSIYNELTKVRYQDERGQMNYFSSIEKKEIFHELFEKNRKVTKKDLQEFLYLKYDIKHAELSGIEKAFNASYTTYHDFLTMSENKQWLEDPELASMFEEIIKTLTVFEDREMIKTRLSHHEATLGKHIIKKLTKKHYTGWGRLSKELIQGIRDKQSNKTILDYLIDDDFPHHRNRNFMQLINDDSLSFKKEIKKAQMITDTENLEEIVKELTGSPAIKKGILQSLKIVDEIVGIMGYEPANIVVEMARENQTTGRGLKSSRPRLKALEESLKDFGSQLLKEYPTDNSSLQKDRLYLYYLQNGRDMYTGAPLDIHRLSDYDIDHIIPRSFTTDNSIDNKVLVSSKENRLKKDDVPSEKVVKKMRSFWYDLYSSKLISKRKLDNLTKIKLTEEDKAGFIKRQLVETRQITKHVAGILHHRFNKAEDTNEPIRKVRIITLKSALVSQFRNRFGIYKVREINEYHHAHDAYLNGVVALALLKKYPQLAPEFVYGEYLKFNAHKANKATVKKEFYSNIMKFFESDTPVCDENGEIFWDKSKSIAQVKKVINHHHMNIVKKTEIQKGGFSKETVEPKKDSSKLLPRKNNWDPAKYGGLGSPNVAYTVAFTYEKGKARKRTNALEGITIMEREAFEQSPVLFLKNKGYEQAEIEMKLPKYALFELENGRKRMVASKEAQKANSFLLPEHLVTLLYHAKQYDEISHKESFDYVNEHHKEFSEVFARVLEFAGKYTLAEKNIEKLEKIYKENQTDDLAKLASSFVNLMQFNAMGAPADFKFFDVTIPRKRYTSLTEIWQSTIIHQSITGLYETRIRMGK

SEQ ID NO: 217 - protein, 1329 aa, Enterococcus faecium
MKKEYTIGLDIGTNSVGWSVLTDDYRLVSKKMKVAGNTEKSSTKKNFWGVRLFDEGQTAEARRSKRTARRRLARRRQRILELQKIFAPEILKIDEHFFARLNESFLVLDEKKQSRHPVFATIKQEKSYHQTYPTIYHLRQALADSSEKADIRLVYLAMAHLLKYRGHFLIEGELNTENSSVTETFRQFLSTYNQQFSEADKLDEAVDCSFVFTEKMSKTKKAETLLKYFPHEKSNGYLSQFIKLMVGNQGNFKNVFGLEEEAKLQFSKETYEEDLEELLEKIGDDYIDLFVQAKNVYDAVLLSEILSDSTKNTRAKLSAGMIRRYDAHKEDLVLLKRFVKENLPKKYRAFFGDNSVNGYAGYIEGHATQEDFYKFVKKELTGIRGSEVFLTKIEQENFLRKQRTFDNGVIPHQIHLTELRAIIANQKKHYPFLKEEQEKLESLLTFKIPYYVGPLAKKQENSPFAWLIRKSEEKIKPWNLPEIVDMEGSAVRFIERMINTDMYIPHNKVLPKNSLLYQKFSIYNELTKVRYQDERGQMNYFSSIEKKEIFHELFEKNRKVTKKDLQEFLYLKYDIKHAELSGIEKAFNASYTTYHDFLTMSENKQWLEDPELASMFEEIIKTLTVFEDREMIKTRLSHHEATLGKHIIKKLTKKHYTGWGRLSKELIQGIRDKQSNKTILDYLIDDDFPHHRNRNCMQLINDDSLSFKKEIKKAQMITDTENLEEIVKELTGSPAIKKGILQSLKIVDEIVGIMGYEPANIVVEMARENQTTGRGLKSSRPRLKALEESLKDFGSQLLKEYPTDNSSLQKDRLYLYYLQNGRDMYTGAPLDIHRLSDYDIDHIIPRSFTTDNSIDNKVLVSSKENRLKKDDVPSEKVVKKMRSFWYDLYSSKLISKRKLDNLTKIKLTEEDKAGFIKRQLVETRQITKHVAGILHHRFNKAEDTNEPIRKVRIITLKSALVSQFRNRFGIYKVREINEYHHAHDAYLNGVVALALLKKYPQLAPEFVYGEYLKFNAHKANKATVKKEFYSNIMKFFESDTPVCDENGEIFWDKSKSIAQVKKVINHHHMNIVKKTEIQKGGFSKETVEPKKDSSKLLPRKNNWDPTKYGGLGSPNVAYTVAFTYEKGKARKRTNALEGITIMEREAFEQSPVLFLKNKGYEQAEIEMKLPKYALFELENGRKRMVASKEAQKANSFLLPEHLVTLLYHAKQYDEISHKESFDYVNEHHKEFSEVFARVLEFAGKYTLAEKNIEKLEKIYKENQTDDLAKLASSFVNLMQFNAMGAPADFKFFDVTIPRKRYTSLTEIWQSTIIHQSITGLYETRIRMGK

SEQ ID NO: 218 - protein, 1329 aa, Enterococcus faecium
MTKDYTIGLDIGTNSVGWAVLTDDYQLMKRKMSVHGNTEKKKIKKNFWGARLFDEGQTAEFRRTKRTNRRRLARRKYRLSKLQDLFAEELCKQDDCFFVRLEESFLVPEEKQYKPASIFPTLEEEKEYYQKYPTIYHLRQKLVDSTEKEDLRLVYLALAHLLKYRGHFLFEGDLDTENTSIEESFRVFLEQYSKQSDQPLIVHQPVLTILTDKLSKTKKVEEILKYYPTEKINSFFAQCLKLIVGNQANFKRIFDLEAEVKLQFSKETYEEDLESLLEKIGDEYLDIFLQAKKVHDAILLSEIISSTVKHTKAKLSSGMVERYERHKADLAKFKQFVKENVPQKATVFFKDTTKNGYAGYIKGKTTQEEFYKFVKKELSGVVGSEPFLEKIDQETFLLKQRTYTNGVIPHQVHLIELKAIIDQQKQHYPFLEEAGPKIIALFKFRIPYYVGPLAKEQEASSFAWIERKTAEKINPWNFSEVVDIEKSAMRFIQRMTKQDTYLPTEKVLPKNSLLYQKYMIFNELTKVSYKDERGVKQYFSGDEKQQIFKQLFQKERGKITVKKLQNFLYTHYHIENAQIFGIEKAFNASYSTYHDFMKLAKTNEWLEQPEMEPIFEDIVKILTIFEDRQMIKHQLSKYQEVFGEKLLKEFARKHYTGWGRFSAKLIHGIRDRKTNKTILDYLIDDDVPANRNRNLMQLINDEHLSFKEEIAKATVFSKHKSLVDVIQDLPGSPAIKKGIWQSLKIVEELIAIIGYKPKNIVIEMARENQKTHRTSPRLKALENGLKQIGSTLLKEQPTDNKALQKERLYLYYLQNGRDMYTGEPLEIENLHQYEVDHIIPRSFIVDNSIDDKVLVASKQNQKKRDDVPKKQIVNEQRIFWNQLKEAKLISTKKYAYLTKIELTPEDKARFIQRQLVETRQITKHVANILHQSFNQEEEGTDCDGVQIITLKATLTSQFRQTFGLYKVREINPHHHAHDAYLNGFIANVLLKRYPKLAPEFVYGKYVKYSLARENKATAKKEFYSNILKFLESDEPFCDENGEIYWEKSHHLPRIKKVLSSHQVNVVKKVEQQKGGFYKETVNSKEKPDKLIERKNNWDVTKYGGFGSPVIAYAIAFVYAKGKTQKKTRAIEGITIMEQAAFEKDPTTFLKEKGFPQVTEFIKLPKYTLFEFDNGRRRFLASKESQKGNPFILSDQLVTLLYHAQHYDKITYQESFDYVNTHLSDFSAILTEVLAFAEKYTLADKNIERIQELYEENKYGETSMIAQSFLQLLQFNAIGAPADFKFFGVTIPRKRYTSLTEIWDATIIYQSVTGLYETRIRMGDLWAGEQ

SEQ ID NO: 219 - protein, 1329 aa, Enterococcus faecium
MKKEYTIGLDIGTNSVGWSVLTDDYRLVSKKMKVAGNTEKSSTKKNFWGVRLFDEGQTAEARRSKRTARRRLARRRQRILELQKIFAPEILKIDEHFFARLNESFLVLDEKKQSRHPVFATIKQEKSYHQTYPTIYHLRQALADSSEKADIRLVYLAMAHLLKYRGHFLIEGELNTENSSVTETFRQFLSTYNQQFSEADKLDEAVDCSFVFTEKMSKTKKAETLLKYFPHEKSNGYLSQFIKLMVGNQGNFKNVFGLEEEAKLQFSKETYEEDLEELLEKIGDDYIDLFVQAKNVYDAVLLSEILSDSTKNTRAKLSAGMIRRYDAHKEDLVLLKRFVKENLPKKYRAFFGDNSVNGYAGYIEGHATQEDFYKFVKKELTGIRGSEVFLTKIEQENFLRKQRTFDNGVIPHQIHLTELRAIIANQKKHYPFLKEEQEKLESLLTFKIPYYVGPLAKKQENSPFAWLIRKSEEKIKPWNLPEIVDMEGSAVRFIERMINTDMYMPHNKVLPKNSLLYQKFSIYNELTKVRYQDERGQMNYFSSIEKKEIFHELFEKNRKVTKKDLQEFLYLKYDIKHAELSGIEKAFNASYTTYHDFLTMSENKQWLEDPELASMFEEIIKTLTVFEDREMIKTRLSHHEATLGKHIIKKLTKKHYTGWGRLSKELIQGIRDKQSNKTILDYLIDDDFPHHRNRNFMQLINDDSLSFKKEIKKAQMITDTENLEEIVKELTGSPAIKKGILQSLKIVDEIVGIMGYEPANIVVEMARENQTTGRGLKSSRPRLKALEESLKDFGSQLLKEYPTDNSSLQKDRLYLYYLQNGRDMYTGAPLDIHRLSDYDIDHIIPRSFTTDNSIDNKVLVSSKENRLKKDDVPSEKVVKKMRSFWYDLYSSKLISKRKLDNLTKIKLTEEDKAGFIKRQLVETRQITKHVAGILHHRFNKAEDTNEPIRKVRIITLKSALVSQFRNRFGIYKVREINEYHHAHDAYLNGVIALALLKKYPQLAPEFVYGEYLKFNAHKANKATVKKEFYSNIMKFFESDTPVCDENGEIFWDKSKSIAQVKKVINHHHMNIVKKTEIQKGGFSKETVEPKKDSSKLLPRKNNWDPAKYGGLGSPNVAYTVAFTYEKGKARKRTNALEGITIMEREAFEQSPVLFLKNKGYEQAEIEMKLPKYALFELENGRKRMVASKEAQKANSFLLPEHLVTLLYHAKQYDEISHKESFDYVNEHHKEFSEVFARVLEFAGKYTLAEKNIEKLEKIYKENQTDDLAKLASSFVNLMQFNAMGAPADFKFFDVTIPRKRYTSLTEIWQSTIIHQSITGLYETRIRMGK

SEQ ID NO: 220 - protein, 1329 aa, Enterococcus hirae
MTKDYTIGLDIGTNSVGWAVLTDDYQLMKRKMSVHGNTEKKKIKKNFWGARLFDEGQTAEFRRTKRTNRRRLARRKYRLSKLQDLFAEELCKQDDCFFVRLEESFLVPEEKQYKPASIFPTLEEEKEYYQKYPTIYHLRQKLVDSTEKGDLRLVYLALAHLLKYRGHFLFEGDLDTENTSIEESFRVFLEQYGKQSDQPLIVHQPVLTILTDKLSKTKKVEEILKYYPTEKINSFFAQCLKLIVGNQANFKRIFDLEAEVKLQFSKETYEEDLESLLEKIGDEYLDIFLQAKKVHDAILLSEIISSTVKHTQAKLSSGMVERYERHKADLAKFKQFVKENVPQKATVFFKDTTKNGYAGYIKGKTTQEEFYKFVKKELSGVVGSEPFLEKIDQETFLLKQRTYTNGVIPHQVHLIELKAIIDQQKQHYPFLEEAGPKIIALFKFRIPYYVGPLAKEQEASSFAWIERKTAEKINPWNFSEVVDIEKSAMRFIQRMTKQDTYLPTEKVLPKNSLFYQKYMIFNELTKVSYKDERGVKQYFSGDEKQQIFKQLFQKERGKITVKKLQNFLYTHYHIENAQIFGIEKAFNASYSTYHDFMKLAKTNEWLEQPEMEPIFEDIVKILTIFEDRQMIKHQLSKYQEVFGEKLLKEFARKHYTGWGRFSAKLIHGIRDRKTNKTILDYLIDDDVPANRNRNLMQLINDEHLSFKEEIAKATVFSKHKSLVDVIQDLPGSPAIKKGIWQSLKIVEELIAIIGYKPKNIVIEMARENQKTHRTKPRLKALENGLKQIGSTLLKEQPTDNKALQKERLYLYYLQNGRDMYTGEPLEIENLHQYEVDHIIPRSFIVDNSIDNKVLVASKQNQKKRDDVPKKQIVNEQRIFWNQLKEAKLISPKKYAYLTKIELTPEDKARFIQRQLVETRQITKHVANILHQSFNQEEEGTDCDGVQIITLKATLTSQFRQTFGLYKVREINPHHHAHDAYLNGFIANVLLKRYPKLAPEFVYGKYVKYSLARENKATAKKEFYSNILKFLESDEPFCDENGEIYWEKSHHLPRIKKVLSSHQVNVVKKVEQQKGGFYKETVNSKEKPDKLIERKNNWDVTKYGGFGSPVIAYAIAFVYAKGKTQKKTKAIEGITIMEQAAFEKDPTTFLKDKGFPQVTEFIKLPKYTLFEFDNGRRRFLASKESQKGNPFILSDQLVTLLYHAQHYDKITYQESFDYVNTHLSDFSAILTEVLAFAEKYTLADKNIERIQELYEENKYGEISMIAQSFLQLLQFNAIGAPADFKFFGVTIPRKRYTSLTEIWDATIIYQSVTGLYETRIRMGDLWAGEQ

SEQ ID NO: 221 - protein, 1329 aa, Enterococcus hirae
MTKDYTIGLDIGTNSVGWAVLTDDYQLMKRKMSVHGNTEKKKIKKNFWGARLFDEGQTAEFRRTKRTNRRRLARRKYRLSKLQDLFAEELCKQDDCFFVRLEESFLVPEEKQYKPASIFPTLEEEKEYYQKYPTIYHLRQKLVDSTEKEDLRLVYLALAHLLKYRGHFLFEGDLDTENTSIEESFRVFLEQYSKQSDQPLIVHQPVLTILTDKLSKTKKVEEILKYYPTEKINSFFAQCLKLIVGNQANFKRIFDLEAEVKLQFSKETYEEDLESLLEKIGDEYLDIFLQAKKVHDAILLSEIISSTVKHTKAKLSSGMVERYERHKADLAKFKQFVKENVPQKATVFFKDTTKNGYAGYIKGKTTQEEFYKFVKKELSGVVGSEPFLEKIDQETFLLKQRTYTNGVIPHQVHLIELKAIIDQQKQHYPFLEEAGPKIIALFKFRIPYYVGPLAKEQEASSFAWIERKTAEKINPWNFSEVVDIEKSAMRFIQRMTKQDTYLPTEKVLPKNSLLYQKYMIFNELTKVSYKDERGVKQYFSGDEKQQIFKQLFQKERGKITVKKLQNFLYTHYHIENAQIFGIEKAFNASYSTYHDFMKLAKTNEWLEQPEMEPIFEDIVKILTIFEDRQMIKHQLSKYQEVFGEKLLKEFARKHYTGWGRFSAKLIHGIRDRKTNKTILDYLIDDDVPANRNRNLMQLINDEHLSFKEEIAKATVFSKHKSLVDVIQDLPGSPAIKKGIWQSLKIVEELIAIIGYKPKNIVIEMARENQKTHRTSPRLKALENGLKQIGSTLLKEQPTDNKALQKERLYLYYLQNGRDMYTGEPLEIENLHQYEVDHIIPRSFIVDNSIDNKVLVASKQNQKKRDDVPKKQIVNEQRIFWNQLKEAKLISPKKYAYLTKIELTPEDKARFIQRQLVETRQITKHVANILHQSFNQEEEGTDCDGVQIITLKATLTSQFRQTFGLYKVREINPHHHAHDAYLNGFIANVLLKRYPKLAPEFVYGKYVKYSLARENKATAKKEFYSNILKFLESDEPFCDENGEIYWEKSHHLPRIKKVLSSHQVNVVKKVEQQKGGFYKETVNSKEKPDKLIERKNNWDVTKYGGFGSPVIAYAIAFVYAKGKTQKKTRAIEGITIMEQAAFEKDPTTFLKEKGFPQVTEFIKLPKYTLFEFDNGRRRFLASKESQKGNPFILSDQLVTLLYHAQHYDKITYQESFDYVNTHLSDFSAILTEVLAFAEKYTLADKNIERIQELYEENKYGETSMIAQSFLQLLQFNAIGAPADFKFFGVTIPRKRYTSLTEIWDATIIYQSVTGLYETRIRMGDLWAGEQ

SEQ ID NO: 222 - protein, 1329 aa, Enterococcus hirae
MTKDYTIGLDIGTNSVGWAVLTDDYQLMKRKMSVHGNTEKKKIKKNFWGARLFDEGQTAEFRRTKRTNRRRLARRKYRLSKLQDLFAEELCKQDDCFFVRLEESFLVPEEKQYKPASIFPTLEEEKEYYQKYPTIYHLRQKLVDSTEKEDLRLVYLALAHLLKYRGHFLFEGDLDTENTSIEESFRVFLEQYGKQSDQPLIVHQPVLTILTDKLSKTKKVEEILKYYPTEKINSFFAQCLKLIVGNQANFKRIFDLEAEVKLQFSKETYEEDLESLLEKIGDEYLDIFLQAKKVHDAILLSEIISSTVKHTQAKLSSGMVERYERHKADLAKFKQFVKENVPQKATVFFKDTTKNGYAGYIKGKTTQEEFYKFVKKELSGVVGSEPFLEKIDQETFLLKQRTYTNGVIPHQVHLIELKAIIDQQKQHYPFLEEAGPKIIALFKFRIPYYVGPLAKEQEASSFAWIERKTAEKINPWNFSEVVDIEKSAMRFIQRMTKQDTYLPTEKVLPKNSLLYQKYMIFNELTKVSYKDERGVKQYFSGDEKQQIFKQLFQKERGKITVKKLQNFLYTHYHIENAQIFGIEKAFNASYSTYHDFMKLAKTNEWLEQPEMEPIFEDIVKILTIFEDRQMIKHQLSKYQEVFGEKLLKEFARKHYTGWGRFSAKLIHGIRDRKTNKTILDYLIDDDVPANRNRNLMQLINDEHLSFKEEIAKATVFSKHKSLVDVIQDLPGSPAIKKGIWQSLKIVEELIAIIGYKPKNIVIEMARENQKTHRTKPRLKALENGLKQIGSTLLKEQPTDNKALQKERLYLYYLQNGRDMYTGEPLEIENLHQYEVDHIIPRSFIVDNSIDNKVLVASKQNQKKRDDVPNKQIVNEQRIFWNQLKEAKLISPKKYAYLTKIELTPEDKARFIQRQLVETRQITKHVANILHQSFNQEEEGTDCDGVQIITLKATLTSQFRQTFGLYKVREINPHHHAHDAYLNGFIANVLLKRYPKLAPEFVYGKYVKYSLARENKATAKKEFYSNILKFLESDEPFCDENGEIYWEKSHHLPRIKKVLSSHQVNVVKKVEQQKGGFYKETVNSKEKPDKLIERKNNWDVTKYGGFGSPVIAYAIAFVYAKGKTQKKTRAIEGITIMEQAAFEKDPTTFLKDKGFPHVTEFIKLPKYTLFEFDNGRRRFLASKESQKGNPFILSDQLVTLLYHAQHYDKITYQESFDYVNTHLSDFSAILTEVLAFAEKYTLADKNIERIQELYEENKYGEISMIAQSFLQLLQFNAIGAPADFKFFGVTIPRKRYTSLTEIWDATIIYQSVTGLYETRIRMGDLWAGEQ

SEQ ID NO: 223 - protein, 1324 aa, Enterococcus italicus
MKNDYTIGLDIGTNSVGYSVVTDDYKVISKKMNVFGNTEKKSIKKNFWGVRLFESGQTAQEARMKRTSRRRIARRKNRICYLQEIFQPEMNHLDNNFFYRLNESFLVADDAKYDKHPIFGTLDEEIHFHEQFPTIYHLRKYLADGDEKADLRLVYLAIAHIIKFRGNFLIEGELNTENNSVIELSKVFVQLYNQTLSELEFIDESIDFSEVLTQQLSKSERADNVLKLFPDEKGTGIFAQFIKLIVGNQGNFKKVFQLEEDQKLQLSTDDYEENIENLLAIIGDEYGDIFVAAQNLYQAILLAGILTSTEKTRAKLSASMIQRYEEHAKDLKLLKRFVKEHIPDKYAEIFNDATKNGYAGYIDGKTKEEEFYKYLKTTLVQKSGYQYFIEKIEQENFLRKQRIYDNGVIPHQVHAEELRAILRKQEKYYSFLKENHEKIEQIFKVRIPYYVGPLAKHNEQSRFAWNIRKSDEPIRPWNMNDVVDENASAVAFIERMTIKDIYLNENVLPRHSLIYEKFTVFNELTKVLYADDRGVFQRFSAEEKEDIFEKLFKSERKVTKKKLENYLRIELSISSPSVKGIEEQFNANFGTYLDLKKFDELHPYLDDEKYQDTLEEVIKVLTVFEDRSMIQNQLEQLPLNLSTKTIKALSRRKYTGWGRLSARLIDGIHDKNSGKTILDYLIDESDSYIVNRNFMQLINDDHLSFKKIIEDSQPYKEQQSAEEIVSELSGSPAIKKGILQSLKIVDELVAIMGYKPKNIVVEMARENQTTGRGKQNSKPRLKGIENGLKEFSDSVLKGSSIDNKQLQNDRLYLYYLQNGKDMYTGHELDIDHLSTYDIDHIIPQSFLTDNSIDNRVLTTSKSNRGKSDNVPSEEVVRKMDRFWRKLLNAKLISERKYTNLTKKELTESDKAGFLKRQLVETRQITKHVATILDSKFNEDSNNRDVQIITLKSALVSEFRKTFNLYKVREINDLHHAHDAYLNAVVALSLLRVYPQLKPEFVYGEYGKNSIHDQNKATIKKQFYSNITRYFASKDIINDDGEILWNKQETIAQVIKTLGMHQVNVVKKVEIQKGGFSKESIQPKGESQKLIRRKQQWNTKKYGGFDSPVVAYAILLSFDKGKRKARSFKIVGITIQDRESFEGNPILYLSKKDYHNPKVEAILPKYSLFEFENGRRRMVASSETQKGNQLIIPGHLMELLYHSKKIINGKNSDSVSYIQNNKEKFREIFEYIVDFSSKYISADANLNKIEKIFENNFHKASEQEIAKSFINLLTFTAMGAPADFEFFGEKIPRKRYVSISEIIDAVFIHQSITGLYETRVRLTEV

SEQ ID NO: 224 - protein, 1323 aa, Enterococcus mundtii
MEKEYTIGLDIGTNSVGWAVLTDDYRLVARKMSIQGDSNRKKIKKNFWGARLFEEGKTAQFRRIKRTNRRRIARRRQRVLALQDIFAEEIHKKDPNFFARLEEGDRVEADKRFAKFPVFATLSEEKNYHRQYPTIYHLRHDLANSKEQADIRLVYLAIAHCLKYRGHFLFEGELDTENTSVTENYQQFLQAYQQFFPEPIGDLDDAVPILTERLSKAKRVEKVLAYYPSEKSTGNFAQFLKLMVGNQANFKKTFDLEEEMKLNFTRDCYEEDLNELLEKTSDDYAELFLKAKGVYDAILLSQILSKSDDETKAKLSANMKLRFEEHQRDLKQLKELVRRDLPKKYDDFFKNRSKNGYAGYVKGKATQEDFYKFLRTELAGLEESQSIMEKIDLEIYLLKQRTFANGVIPHQIHLVEMREIMDRQKRFYPFLKGAQGKIEKLLTFRIPYYVGPLAQEGQSPFAWIKRKSPSQITPWNFAEVVDKENSAIEFIERMTNQDTYLPKEKVLPKQSLIYQRFMIFNELTKVSYTDERGKSHYFSSEQKRKIFNELFKQHPRVTEKQLRKFLELNEQIDSTEIKGIETSFNASYSTYHDLLKLSTLLDDPDMTTMFEEIIKILTIFEDREMIREQLKPYETVLGLPAIKKLAKKHYTGWGRLSEKMIQGMREKQSRKTILDYLIDDDFPCNRNRNFMQLINDDHLSFKETIANELIMSDSNVLLDQVKAIPGSPAVKKGIWQSIKIVEEIIGIIGKAPKNIVIEMARENQRTSRSRPRLKALEEALKNIDSPLLKDYPTDNQALQKDRLYLYYLQNGKDMYTGEPLEIHRLSEYDIDHIIPRSFIVDNSLDNKVLVSSKVNRGKLDNAPDPLVVKRMRSHWEKLHQAKLISDKKLANLTKQNLTEADKARFIQRQLVETRQITKHVANLLHQHFNLPEEVSATEKTSIITLKSTLTSQFRQMFDIYKVREINHHHHAHDAYLNGVVAMTLLKKYPKLAPEFVYGSYIKGDINQINKATAKKEFYSNIMKFFESEEIICDEQGEVIWNKKRDLSTIKKTIGAHQVNIVKKVEKQKGGFYKETINSKANPEKLIPRKASLDPLKYGGYGSPLVAYTVIFIFEKGKQKKVTKGIEGITVMEQLRFEQDPREFLKTKGYEGVKQWLILPKYILFEAQGGYRRMIASQETQKANSLILPENLVTLLYHARHYDEINHKVSFDYVNAHKEGFNDIFDFISDFGVRYILAPQHLEKIKVAYEKNKEVDLKEMIDAILSLLKFTLFGASVEFKFFDIKILKRYKSLTDIWEATIIYQSVTGLYERRVEVRKLWDGER

SEQ ID NO: 225 - protein, 1330 aa, Enterococcus phoeniculicola
MKKEYTIGLDIGTNSVGWAVLTENYDLVKKKMKVYGNTETKYLKKNLWGVRLFDEGETAADRRLKRTTRRRYSRRRNRICRLQDLFTEEMNQVDANFFHRLQESFLVPDEKEFERHAIFGKMEEEVSYYREFPTIYHLRKHLADTSEQADLRLVYLALAHIVKYRGHFLIEGELNTENSSVSETFRTFIQVYNQIFRENEPLAVPDNIEELFSEKVSRARKVEAILSVYSEEKSTGTLAQFLKLMVGNQGRFKKTFDLEEDGIIQIPKEEYEEELETLLAIIGDEYAEIFSATKSVYDAVALSGILSVTDGDTKAKLSASMVERYEAHQKDLVQFKQFIRKELPEMYAPIFRDNSVSGYAGYVENSVTQAEFYKYIKKAIEKVPGAEYFLEKIEQETFLDKQRTFNNGVIPHQIHLEELEAIIQKQATYYPFLADNKEEMKQLVTFRIPYYVGPLADGNSPFAWLERISSEPIRPGNLAEVVDIKKSATKFIERMTNFDTYLPTEKVLPKHSMIYEKYMVYNELTKVSYVDERGMNQRFSGEEKKQIVEELFKQSRKVTKKLLEKFLSNEFGLVDVAIKGIETSFNAGYGTYHDFLKIGITREQLDKEENSETLEEIVKILTVFEDRKMIREQLKKYTYLFDEEVLKKLERRHYTGWGRLSAKLLIGIKEKRTHKTILDYLIDDGGKQPINRNLMQLINDSDLSFKSEIAEAQSDMNTEDLHEVVQNLAGSPAIKKGILQSLKIVDELVDIMGSLPKNIVVEMARENQTTSRGRTNSNPRMKALEEAMRNLRSNLLKEYPTDNQALQNDRLYLYYLQNGKDMYTGLDLSLHNLSSYDIDHIVPQSFTTDNSLDNRVLVSSKENRGKKDDVPSKEVVQKNITLWETLKNSNLISQKKYDNLTKGLRGGLTEDDRAHFIKRQLVETRQITKHVARILDQRFNSQKDEEGKTIRAVRVVTLKSSLTSQFRKQFAIHKVREINDYHHGHDAYLNGVVANSLLRVYPQLQPEFVYGDYPKFNAYKANKATAKKQLYTNIMKFFAEDAVIIDENGEILWDKKNIATVKKVMSYPQMNIVKKPEIQTGSFSKETIKPKGDSDKLISRKTNWSPKLYGGFDSPQVAYSVIITYEKGKKKVRAKAIVGITIMEQSLFKKDPVSLLEEKGYANPEVLIHLPKYTLYELENGRRRLLASANEAQKGNQLVLPASLVTLLYHAKQVDEDSGKSEEYVREHRAEFAEILNYVQAFSETKILANKNLQTILKLYEENKEADIKEIAESFVNLMKFSAYGAPMDFKFFGKTIPRSRYTSVGELLSATIINQSITGLYETRRKLVD

SEQ ID NO: 226 - protein, 1327 aa, Enterococcus sp. AM1
MGKEYTIGLDIGTNSVGWAVLQEDLDLVRRKMKVYGNTEKNYLKKNFWGVDLFDEGMTAKDTRLKRTTRRRYFRRRQRISYLQTFFQEEMNRIDPNFFNRLDESFLIEEDKLSERHPIFGTIEEEVAYHKNYATIYHLRKELADAEEKADLRLVYLALAHIIKYRGHFLIEGRLSTENTSTEETFKTFLQKYNQTFNPVDETISIGSIFADKVSRAKKAEGVLALFPDEKRNGTFDQFLKMIVGNQGNFKKTFELEEDAKLQFSKEEYDESLEALLGEIGDEYADVFEAAKNVYNAVELSGILTVTDNSTKAKLSASMIKRYEDHKTDLKLFKEFIRKNLPEKYHEIFNDKNTDGYAGYIDNSTSQEKFYKYITNLIEKIDGAEYFLKKIENEDFLRKQRTFDNGIIPHQIHLEELKAILHHQAMYYPFLQEKFSNFVDLLTFRIPYYVGPLANGNSRFSWLSRKSDEPIRPWNLAEVVDLSKSAELFIERMTNFDLYLPSEKVLPKHSMLYEKYTVYNELTKVTYKDEQGKVQNFSSEEKERIFIDLFKQHRKVTKKDLSNFLRNEYNLDDVIIDGIENKFNASFNTYHDFLKLKIDPKVLDDPANEPMFEEIVKILTIFEDRKMLREQLSKFSDRLSEKTIKDLERRHYTGWGRLSAKLINGIHDKQSNKTILDYLIDDAPKKNINRNFMQLINDNRLTFKEEIEKEQLKANSEESLIEIVQNLAGSPAIKKGIFQSLKIVDELVEIMGYAPTNIVVEMARENQTTANGRRNSRPRLKNLEKAIDDLDSEILKKHPVDNKALQKDRLYLYYLQNGKDMYTNEELDIHKLSTYDIDHIIPQSFIVDNSLDNRVLVSSSKNRGKLDDVPSKEVVKKMRAFWESLYRSGLISKKKFDNLVKAESGGLSEDDKAGFIHRQLVETRQITKNVARILHQRFNSEKDEEGNLIRKVRIITLKSALTSQFRKNYGIYKIREINDYHHAHDAYLNGVVATALLKIYPQLEPEFVYGEFHRFNAFKENKATAKKQFYSNLMEFSKSDKVIIDENGEILWNQKKIVTVKKVMNYRQMNIVKKVEIQKGGFSKESILPKGDSDKLISRKKEWDTTKYGGFDSPNVAYSVVIRYEKGKTRKLVKTIVGITIMERAAFEKNEREFLKNKGYQNPQICMKLPKYSLYEFDDGRRRLLASAKEAQKGNQMVLPAHLVTFLYHAKHCNEKPDSLKYVTEHQSGFSEIMAHVKDFAEKYTLVDKNLEKILSLYAKNMDSEVKEIAQSFVDLMQLNAFGAPADFKFFGETIPRKRYTSVNELLEATIINQSITGLYETRRRLGD

SEQ ID NO: 227 - protein, 1332 aa, Enterococcus villorum
MNKAYTLGLDIGTNSVGWAVVTDDYRLMAKKMPVHSKMEKKKIKKNFWGARLFDEGQTAEERRNKRATRRRLRRRKYRILELQKIFSEEILKKDSHFFARLDESFLIPEDKQYARFPIFPTLLEEKAYYQNYPTIYHLRQKLADSTEKADIRLVYLALAHMIKYRGHFLFEGELDTENTSVEETFKEFIDIYNEQFEEGIIFYKDIPLILTDKLSKSKKVEKILQYYPKEKTTGCLAQFLKLIVGNQGNFKQAFHLDEEVKIQISKETYEEDLEKLLRKSNEEMIDVFLQVKKVYDAILLSDILSTKMKDTKAKLSAGMIERYQNHKKDLEELKQFVRAHLHEKVTVFFKDSSKDGYAGYIDGKTTQADFYKFLKKELTGVPGSEPMLAKIDQENFLLKQRTPTNGVIPHQVHLTEFKAIIDQQKQYYPFLEKSKEKMIQLLTFRIPYYVGPLAQDKETSSFAWLERKTTEKIKPWNAKDVIDYGASATKFIQRMINYDTYLPTEKVLPKYSMLYQKYTIFNELTKVAYKDDRGIKHQFSSEEKLRIFQELFKKQRRVTKKKLQHFLSANYNIEDAEILGVDKVFNSSYATYHDFLELAKPYELLEQPEMEEMFEDIVKIITIFEDREMVRTQLKKYQRILGEEIFKKLVKKKYTGWGRLSKRLINGIRDQKTNKTILDYLIDDDFPYNRNRNFMQLINDDHLSFKEEIAKELTLSDKQSLLEVVEAIPGSPAIKKGIWQTLKIVEELIAIIGYKPKNIVIEMARENQTTTGGKNRSKPRLKSLEEALKNFDSQLLKERPVDNQSLQKDRLYLYYLQNGKDMYTGESLDIDRLSEYDIDHIIPRSFIVDHSLDNKVLVSSKENRLKKDDVPDSKVVKRMKAYWEKLLRANLISERKFSYLTKLELTDDDKARFIQRQLVETRQITKHVAAILHQYFNQTQELEKEKDIRIITLKSSLVSQFRQVFGIHKVREINHHHHAHDAYLNAVVALALLKKYPRLAPEFVYGSFAKFHLVKENKATAKKEFYSNILKFFEKEEQFCDENGEIFWDKRKHIQQIKKVISSHQVNIVKKVEVQTGSFYKETVNTKEKPDKLIKRKNNWDVTKYGGFGSPVVAYAVVFTYEKGKNHKKAKAIEGITIMEQALFEKDPISFLIEKGYSNVNQFIKLPKYTLFELANGQRRMLASQELQKANSFILPEKLVTLLYHANHYDEIAYKDSYDYVNEHFSNFQDILDKVIIFAEKYTSAPQKLNQIIATYEKNQEADRKIMAHSFVNLMQFNALGAPADFKFFDTTITRKRYTSLTEIWQSTIIYQSVTGLYETRRRMADLWDGVQ

SEQ ID NO: 228 - protein, 1359 aa, Artificial Sequence
  Synthetic Polypeptide
ADKKYSIGLDIGTNSVGWAVITDEYKVPSKKFKVLGNTDRHSIKKNLIGALLFDSGETAEATRLKRTARRRYTRRKNRICYLQEIFSNEMAKVDDSFFHRLEESFLVEEDKKHERHPIFGNIVDEVAYHEKYPTIYHLRKKLVDSTDKADLRLIYLALAHMIKFRGHFLIEGDLNPDNSDVDKLFIQLVQTYNQLFEENINASGVDAKAILSARLSKSRRLENLIAQLPGEKKNGLFGNLIALSLGLTPNFKSNFDLAEDAKLQLSKDTYDDDLDNLLAQIGDQYADLFLAAKNLSDAILLSDILRVNTEITKAPLSASMIKRYDEHHQDLTLLKALVRQQLPEKYKEIFFDQSKNGYAGYIDGGASQEEFYKFIKPILEKMDGTEELLVKLNREDLLRKQRTFDNGSIPHQIHLGELHAILRRQEDFYPFLKDNREKIEKILTFRIPYYVGPLARGNSRFAWMTRKSEETITPWNFEEVVDKGASAQSFIERMTNFDKNLPNEKVLPKHSLLYEYFTVYNELTKVKYVTEGMRKPAFLSGEQKKAIVDLLFKTNRKVTVKQLKEDYFKKIECFDSVEISGVEDRFNASLGTYHDLLKIIKDKDFLDNEENEDILEDIVLTLTLFEDREMIEERLKTYAHLFDDKVMKQLKRRRYTGWGRLSRKLINGIRDKQSGKTILDFLKDGFANRNFMQLIHDDSLTFKEDIQKAQVSGQGDSLHEHIANLAGSPAIKKGILQTVKVVDELVKVMGRHKPENIVIEMARENQTTQKGQKNSRERMKRIEEGIKELGSQILKEHPVENTQLQNEKLYLYYLQNGRDMYVDQELDINRLSDYDVDHIVPQSFLKDDSIDNKVLTRSDKNRGKSDNVPSEEVVKKMKNYWRQLLNAKLITQRKFDNLTKAERGGLSELDKAGFIKRQLVETRQITKHVAQILDSRMNTKYDENDKLIREVKVITLKSKLVSDFRKDFQFYKVREINNYHHAHDAYLNAVVGTALIKKYPKLESEFVYGDYKVYDVSEQEIGKATAKYFFYSNIMNFFKTEITLANGEIRKRPLIETNGETGEIVWDKGRDFATVRKVLSMPQVNIVKKTEVQTGGFSKESILPKRNSDKLIARKKDWDPKKYGGFDSPTVAYSVLVVAKVEKGKSKKLKSVKELLGITIMERSSFEKNPIDFLEAKGYKEVKKDLIIKLPKYSLFELENGRKRMLASGELQKGNELALPSKYVNFLYLASHYEKLKGSPEDNEQKQLFVEQHKHYLDEIIEQISEFSKRVILADANLDKVLSAYNKHRDKPIREQAENIIHLFTLTNLGAPAAFKYFDTTIDRKRYTSTKEVLDATLIHQSITGLYETRIDLSQLGGD

SEQ ID NO: 229 - protein, 1300 aa, Kandleria vitulina
NNKIYNIGLDIGDASVGWAVVDEHYNLLKRHGKHMWGSRLFTQANTAVERRSSRSTRRRYNKRRERIRLLRGIMEDMVLDVDPTFFIRLANVSFLDQEDKKDYLKSNYNLFIDKDFNDKTYYDKYPTIYHLRKHLCESKEKEDPRLIYLALHHIVKYRGNFLYEGQKFSMDVSNIEDKMIDVLRQFNEINLFEYVEDKKIDEVLNVLKEPLSKKHKADKAFALFDTTKDNKAAYKELCAALAGNKFNVTKMLKEAELHDEDEKDISFKFSDATFDDAFVEKQPLLGDCVEFIDLLHDIYSWVELQNILGSAHTSEPSISAAMIQRYEDHKNDLKLLKDVIRKYLPKKYFEVFRDEKSKKNNYCNYINHKTPVDEFYKYIKKLIEKIDDPDVKTILNKIELESFMLKQNSRTNGAVPYQMQLDELNKILENQSVYYSDLKDNEDKIRSILTFRIPYYFGPLITKDRQFDWIIKKEGKENERILPWNANEIVDVDKTADEFIKRMRNFCTYFPDEPVLAKNSLTVSKYEVLNEINKLRINDHLIKRDIKDKMLHTLFMDHKSISANAMKKWLVKNQYFSNTDDIKIEGFQKENACSTSLTPWIDFTKIFGEINNSNYELIEKIIYDVTVFEDKKILRRRLKKEYDLDEEKIKKILKLKYSGWSRLSKKLLSGIKTKRTPETVLEVMETNMNLMQVINDEKLGFKKTIDDANSTSVSGKFSYAEVQELAGSPAIKRGIWQALLIVDEIKKIMKHEPAHVYIEFARNEDKERKDSFVNQMLKLYKDFEDEANKHLKGEDAKSKIRSERLKLYYTQMGKCMYTGKSLDIDRLDTYQVDHIVPQSLLKDDSIDNKVLVLSSENQRKLDDLVIPEMIRNKMFGFWNKLYENKIISPKKFYSLIKSEYSDKDKERFINRQIVETRQITKHVAQIISNHYETTKVVTVRADLSHAFRERYHIYKNRDINDFHHAHDAYIATILGTYIGHRFESLDAKYIYGEYQKIFRNKNKDKKDGFILNSMRNLYADKDTGEVVWDPEWISRIKKCFYYKDCFVTKKLEENNGSFFNTVRPNDEHSEKGAKVPVNKLRSNVHKYGGFEGLKYSIVAIKGKKKKGKKIIDVNKLVGIPLMYKNVDDETKINYIKESEGLEEVKIIKEILKNQLIEINGGLFYVTSEIVNARQLILDFNCTRIIDGIYKAMKYKNYSELSQEEIMNVYDIFVEKLKLYYPTYKNIATNFENFENISDEEKCEVIQMLVVMHAGPQNGNITFDDFKLSNRLGRLNCKTISLTTVFIADSPTGMYSKKYKL

SEQ ID NO: 230 - protein, 1301 aa, Kandleria vitulina
NNKIYNIGLDIGDASVGWAVVDEHYNLLKRHGKHMWGSRLFTQANTAVERRSSRSTRRRYNKRRERIRLLREIMEDMVLDVDPTFFIRLANVSFLDQEDKKDYLKSNYNLFIDKDFNDKTYYDKYPTIYHLRKHLCESKEKEDPRLIYLALHHIVKYRGNFLYEGQKFSMDVSNIEDKMIDVLRQFNEINLFEYVEDKKIDEVLNVLKEPLSKKHKAEKAFALFDTTKDNKAAYKELCAALAGNKFNVTKMLKEAELHDEDEKDISFKFSDATFDDAFVEKQPLLGDCVEFIDLLHDIYSWVELQNILGSAHTSEPSISAAMIQRYEDHKNDLKLLKDVIRKYLPKKYFEVFRDEKSKKNNYCNYINHKTPVDEFYKYIKKLIEKIDDPDVKTILNKIELESFMLKQNSRTNGAVPYQMQLDELNKILENQSVYYSDLKDNEDKIRSILTFRIPYYFGPLITKDRQFDWIIKKEGKENERILPWNANEIVDVDKTADEFIKRMRNFCTYFPDEPVMAKNSLTVSKYEVLNEINKLRINDHLIKRDMKDKMLHTLFMDHKSISANAMKKWLVKNQYFSNTDDIKIEGFQKENACSTSLTPWIDFTKIFGKINESNYDFIEKIIYDVTVFEDKKILRRRLKKEYDLDEEKIKKILKLKYSGWSRLSKKLLSGIKTKRTPETVLEVMETNMNLMQVINDEKLGFKKTIDDANSTSVSGKFSYAEVQELAGSPAIKRGIWQALLIVDEIKKIMKHEPAHVYIEFARNEDKERKDSFVNQMLKLYKDFEDEANKHLKGEDAKSKIRSERLKLYYTQMGKCMYTGKSLDIDRLDTYQVDHIVPQSLLKDDSIDNKVLVLSSENQRKLDDLVIPSSIRNKMYGFWEKLFNNKIISPKKFYSLIKTEFNEKDQERFINRQIVETRQITKHVAQIIDNHYENTKVVTVRADLSHQFRERYHIYKNRDINDFHHAHDAYIATILGTYIGHRFESLDAKYIYGEYKRIFRQKNKGKNDGFILNSMRNIYADKDTGEIVWDPNYIDRIKKCFYYKDCFVTKKLEENNGTFFNTVLPNDTNSDKDATVPVNKYRSNVNKYGGFSGVNSFIVAIKGKKKKGKKVIEVNKLTGIPLMYKNADEEIKINYLKQAEDLEEVQIGKEILKNQLIEKDGGLYYIVAEIINAKQLILNESQTKLVCEIYKAMKYKNYDNLDSEKIIDLYRLLINKMELYYPEYRKQLVKKFEDLKVISIEEKCNIIQILATLHCNSSIGKIMYSDFKISTTIGRLNGRTISLDISFIAESPTGMYSKKYKL

SEQ ID NO: 231 - protein, 1304 aa, Lactobacillus animalis
LKKDYSIGLDIGTNSVGHAVVTDDYKVPTKKMKVFGDTSKKTIKKNMLGVLLFNEGQTAADTRLKRGARRRYTRRKNRLRYLQEIFAPALAKVDPNFFYRLEESSLVAEDKKYDVYPIFGKREEELLYHDTHKTIYHLRSELANNDRPADLRLVYLALAHIIKYRGNFLLEGEIDLRTTDINKVFAEFSETLNENSDENLGKLDVADIFKDNTFSKTKKSEELLKLSGKKNQLAHQLFKMMVGNMGSFKKVLGTDEEHKLSFGKDTYEDDLNDLLAEAGDQYLDIFVAAKKVYDAAILASILDVKDTQTKTVFSQAMIERYEEHQKDLIELKRVFKKYLPEKCHDFFSEPKISGYAGYIDGKVSEEDFYKYTKKTLKGIPETEEILQKIDANNYLRKQRTFDNGAIPHQVHLKELVAIVENQGKYYPFLRENKDKFEKILNFRIPYYVGPLARGNSKFAWLTRAGEGKITPYNFDEMIDKETSAEDFIKRMTINDLYLPTEPVLPKHSLLYERYTIFNELAGVRYVTENGEAKYFDAQTKRSIFELFKLDRKVSEKMVIKHLKVVMPAIRIQALKGLDNGKFNASYGTYKDLVDMGVAPELLNDEVNSEKWEDIIKTLTIFEGRKLIKRRLENYRDFLGEDILRKLSRKKYTGWGRLSAKLLDGIYDKKTHKTILDCLMEDYSQNFMQLINDDTYSFKETIKNAQVIEKEETLAKTVQELPGSPAIKKGILQSLEIVDEIIKVMGYKPKSIVVEMARETQTHGTRKREDRVQQIVKNLKELPKPSNAELSDERKYLYCLQNGRDMYTGAPLDYDHLQFYDVDHIIPQSFLKDDSIENKVLTIKKENVRKTNGLPSEAVIQKMGSFWKKLLDAGAMTNKKYDNLRRNLHGGLNEKLKERFIERQLVETRQITKYVAQLLDQRLNYDGNGVELDEKIAIVTLKAQLASQFRSEFKLRKVRALNNLHHAHDAYLNAVVANLIMAKYPELEPEFVYGKYRKTKFKGLGKATAKNTLYANVLYFLKENEVYPFWDKARDLPTIKRYLYRAQVNKVRKAERQTGGFSDEMLVPKSDSGKLLPRKEGLDPVKYGGYAKAVESYAVLITADEVKKGKTKKVKTLVNIPIIDSKKYEADPTAYLASRGYTNVTNSFILPKYSLLEDPEGRRRYLASKEFQKANELILPQHLVELLYWVNAKDGEQKLEDHKAEFKELFDKIMEFADKYVVAPKNSEKIRRLYEENQDATPMELGKNFVELLRYTADGAASDFKFFGENIPRKRYNSAGSLLNGTLIYQSKTGLYETRIDLGKL

SEQ ID NO: 232 - protein, 1292 aa, Lactobacillus curvatus
MSRPYNIGLDIGTSSIGWSVVDDQSKLVSVRGKYGYGVRLYDEGQTAAERRSFRTTRRRLKRRKWRLGLLREIFEPYITPVDDTFFLRKKQSNLSPKDQRKQTSLFNDRTDRAFYDDYPTIYHLRYKLMTEKRQFDIREIYLAMHHIVKYRGHFLNEAPVSSFKSSEINLVAHFDRLNTIFADLFSESGFTDKLAEVKALLLDNHQSASNRQRQALLLIYTPSKQNKAIATELLKAILGLKAKFNVLTGIEAEDVKTWTLTFNAENFDEEMVKLESSLDDNAHQIIESLQELYSGVLLAGIVPENQSLSQAMITKYDDHQKHLKMLKAVREALAPEDRQRLKQAYDQYVDGKSKEDFYGDITKALKNNPDHPIVSEIKKLIELDQFMPKQRTKDNGAIPHQLHQQELDRIIENQQQYYPWLAELNPNKLDELVAFRVPYYVGPLQQQSSDAKFAWMIRKAEGQITPWNFDDKVDRQASANEFIKRMTTTDTYLLAEDVLPKQSLIYQRFEVLNELNGLKIDDQPITTELKQAIFTDLFMQKTSVTVKNIQDYLVSEKRYASRPAITGLSDENKFNSRLSTYHDLKTIVGDAVDDVDKQADLEKCIEWSTIFEDGKIYSAKLNEIDWLTDQQRVQLAAKRYRGWGRLSAKLLTQIVNANGQRIMDLLWTTDNFMRIVHSEDFDKLITEANQMMLAENDVQDVINDLYTSPQNKKALRQILLVVNDIQKAMKGQAPERILIEFAREDEVNPRLSVQRKRQVEQVYQNISELEIRNELKDLSNSALSNTRLFLYFMQGGRDMYTGDSLNIDRLSTYDIDHILPQSFIKDNSLDNRVLVSQRMNRSKADQVPSVELGQKMQIQWEQMLRAGLITKKKYDNLTLNPDMKGFINRQLVETRQVIKLATNLLMEQYGEDNIELITVKSGLTHQMRTEFDFPKNRNLNNHHHAFDAYLTAFVGLYLLKRYPKLKPYFVYGEYQKASQQDKRNFNFLNGLKKDELVDENTEAVIWNKESGLAYLNKIYQFKKILVTREVHENSGALFNQTLYAAKDDKASGQLIPAKQDRPTALYGGYSGKTVAYMCIVRIKNKKGDLYKVCGVETSWLAQLKQKKAFLKQKISPQFTKVKKQKGTIVKVVEDFEVIAPHILINQRFFDNGQELTLGSHNEQELILDKTAVKLLNGALPLTQSEELAEQVYDEILDQVMHYFPLYDTNQFRAKLSAGKAADGNKMVQVGQQVILDRVLIGLHANAAVSDLGVLKISTPLGKMQQPSGISDTQIIYQSPTGLFERRVALRDL

SEQ ID NO: 233 - protein, 1291 aa, Lactobacillus farciminis
KEQPYNIGLDIGTGSVGWAVTNDNYDLLNIKKKNLWGVRLFEGAQTAKETRLNRSTRRRYRRRKNRINWLNEIFSEELANTDPSFLIRLQNSWVSKKDPDRKRDKYNLFIDNPYTDKEYYREFPTIFHLRKELIINKNKADIRLVYLALHNILKYRGNFTYEHQKFNISTLNSNLSKELIELNQQLIKYDISFPDNCDWNHISDILIGRGNATQKSSNILNNFTKETKKLLKEVINLILGNVAHLNTIFKTSLTKDEEKLSFSGKDIESKLDDLDSILDDDQFTVLDTANRIYSTITLNEILNGESYFSMAKVNQYENHAIDLCKLRDMWHTTKNEKAVGLSRQAYDDYINKKKELYTSLKKFLKVALPTNLAKEAEEKISKGTYLVKPRNSENGVVPYQLNKIEMEKIIDNQSQYYPFLKENKEKLLSILSFRIPYYVGPLQSSEKNPFAWMERKSNGHARPWNFDEIVDREKSSNKFIRRMTVTDSYLVGEPVLPKNSLIYQRYEVLNELNNIRITENLKTNPTGSRLTVETKQHIYNELFKNYKKITVKKLTKWLIAQGYYKNPILIGLSQKDEFNSTLTTYLDMKKIFGSSFMENNKNYNQIEELIEWLTIFEDKQILNEKLHSSNYSYTSDQIKKISNMRYKGWGRLSKKILTCITTETNTPKSLQLSNDLMWTTNNNFISIISNDKYDFKNYIENHNLNKNEDQNISNLVNDIHVSPALKRGITQSIKIVQEIVKFMGHAPKYIFIEVTRETKTTSRGKRIQRLQSKLLNKANGLVPEELKKHKNDLSSERIMLYFLQNGKSLYSEESLNINKLSDYQVDHILPRTYIPDDSLENKALVLAKENQRKADDLLLNSNVIDKNLERWTYMLNNNMMGLKKFKNLTRRVITDKDKLGFIHRQLVQTSQMVKGVANILNSMYKNQGTTCIQARANLSTAFRKALELVKNRNINDFHHAQDAYLASFLGTYRLRRFPTDEMLLMNGEYNKFYGKELYSKKSRKNGFIISPLVNGTTQDRNTGEIIWNVGFRDKILKIFNYHQCNVTRKTEIKTGQFYDQTIYSPKNPKKLIAQKKDMDPNIYGGFSGDNKSSITIVKIDNNKIKPVAIPIRLINDKKTLQNWLEENVKHKKSIQIIKNNVPIGQIIYSKKVGLLSREIANRQQLILPPEHSALLRILQIPDEDPDQILAFYDKNILVEILQELITKMKKFYPFYKNEQEFLASFNQATTSEKINSLEELITLLHANSTSAHLIFNNIEKKAFGRKTHGLTDTDFIYQSVTGLYETRIHIE

SEQ ID NO: 234 - protein, 1327 aa, Listeria innocua
MKKPYTIGLDIGTNSVGWAVLTDQYDLVKRKMKIAGDSEKKQIKKNFWGVRLFDEGQTAADRRMARTARRRIERRRNRISYLQGIFAEEMSKTDANFFCRLSDSFYVDNEKRNSRHPFFATIEEEVEYHKNYPTIYHLREELVNSSEKADLRLVYLALAHIIKYRGNFLIEGALDTQNTSVDGIYKQFIQTYNQVFASGIEKLEDNKDVAKILVEKVTRKEKLERILKLYPGEKSAGMFAQFISLIVGSKGNFQKPFDLIEKSDIECAKDSYEEDLESLLALIGDEYAELFVAAKNAYSAVVLSSIITVAETETNAKLSASMIERFDTHEEDLGELKAFIKLHLPKHYEEIFSNTEKHGYAGYIDGTKQADFYKYMKMTLENIEGADYFIAKIEKENFLRKQRTFDNGAIPHQLHLEELEAILHQQAKYYPFLKENYDKIKSLVTFRIPYFVGPLANGQSEFAWLTRKADGEIRPWNIEEKVDFGKSAVDFIEKMTNKDTYLPKENVLPKHSLCYQKYLVYNELTKVRYINDQGKTSYFSGQEKEQIFNDLFKQKRKVKKKDLELFLRNMSHVESPTIEGLEDSFNSSYSTYHDLLKVGIKQEILDNPVNTEMLENIVKILTVFEDKRMIKEQLQQFSDVLDGVVLKKLERRHYTGWGRLSAKLLMGIRDKQSHLTILDYLMDDGLNRNLMQLINDSNLSFKSIIEKEQVTTADKDIQSIVADLAGSPAIKKGILQSLKIVDELVSVMGYPPQTIVVEMARENQTTGKGKNNSRPRYKSLEKAIKEFGSQILKEHPTDNQELRNNRLYLYYLQNGKDMYTGQDLDIHNLSNYDIDHIVPQSFITDNSIDNLVLTSSAGNREKGDDVPPLEIVRKRKVFWEKLYQGNLMSKRKFDYLTKAERGGLTEADKARFIHRQLVETRQITKNVANILHQRFNYEKDDHGNTMKQVRIVTLKSALVSQFRKQFQLYKVRDVNDYHHAHDAYLNGVVANTLLKVYPQLEPEFVYGDYHQFDWFKANKATAKKQFYTNIMLFFAQKDRIIDENGEILWDKKYLDTVKKVMSYRQMNIVKKTEIQKGEFSKATIKPKGNSSKLIPRKTNWDPMKYGGLDSPNMAYAVVIEYAKGKNKLVFEKKIIRVTIMERKAFEKDEKAFLEEQGYRQPKVLAKLPKYTLYECEEGRRRMLASANEAQKGNQQVLPNHLVTLLHHAANCEVSDGKSLDYIESNREMFAELLAHVSEFAKRYTLAEANLNKINQLFEQNKEGDIKAIAQSFVDLMAFNAMGAPASFKFFETTIERKRYNNLKELLNSTIIYQSITGLYESRKRLDD

SEQ ID NO: 235 - protein, 1327 aa, Listeria innocua
MKKPYTIGLDIGTNSVGWAVLTDQYDLVKRKMKIAGDSEKKQIKKNFWGVRLFDEGQTAADRRMARTARRRIERRRNRISYLQGIFAEEMSKTDANFFCRLSDSFYVDNEKRNSRHPFFATIEEEVEYHKNYPTIYHLREELVNSSEKADLRLVYLALAHIIKYRGNFLIEGALDTQNTSVDGIYKQFIQTYNQVFASGIEKLEDNKDVAKILVEKVTRKEKLERILKLYPGEKSAGMFAQFISLIVGSKGNFQKPFDLIEKSDIECAKDSYEEDLESLLALIGDEYAELFVAAKNAYSAVVLSSIITVAETETNAKLSASMIERFDTHEEDLGELKAFIKLHLPKHYEEIFSNTEKHGYAGYIDGTKQADFYKYMKMTLENIEGADYFIAKIEKENFLRKQRTFDNGAIPHQLHLEELEAILHQQAKYYPFLKENYDKIKSLVTFRIPYFVGPLANGQSEFAWLTRKADGEIRPWNIEEKVDFGKSAVDFIEKMTNKDTYLPKENVLPKHSLCYQKYLVYNELTKVRYINDQGKTSYFSGQEKEQIFNDLFKQKRKVKKKDLELFLRNMSHVESPTIEGLEDSFNSSYSTYHDLLKVGIKQEILDNPVNTEMLENIVKILTVFEDKRMIKEQLQQFSDVLDGVVLKKLERRHYTGWGRLSAKLLMGIRDKQSHLTILDYLMDDGLNRNLMQLINDSNLSFKSIIEKEQVTTADKDIQSIVADLAGSPAIKKGILQSLKIVDELVSVMGYPPQTIVVEMARENQTTGKGKNNSRPRYKSLEKAIKEFGSQILKEHPTDNQELRNNRLYLYYLQNGKDMYTGQDLDIHNLSNYDIDHIVPQSFITDNSIDNLVLTSSAGNREKGDDVPPLEIVRKRKVFWEKLYQGNLMSKRKFDYLTKAERGGLTEADKARFIHRQLVETRQITKNVANILHQRFNYEKDDHGNTMKQVRIVTLKSALVSQFRKQFQLYKVRDVNDYHHAHDAYLNGVVANTLLKVYPQLEPEFVYGDYHQFDWFKANKATAKKQFYTNIMLFFAQKDRIIDENGEILWDKKYLDTVKKVMSYRQMNIVKKTEIQKGEFSKATIKPKGNSSKLISRKTNWDPMKYGGLDSPNMAYAVVIEYAKGKNKLVFEKKIIRVTIMERKAFEKDEKAFLEEQGYRQPKVLAKLPKYTLYECEEGRRRMLASANEAQKGNQQVLPNHLVTLLHHVANCEVSDGKSLDYIESNREMFAELLAHVSEFAKRYTLAEANLNKINQLFEQNKEGDIKAIAQSFVDLMAFNAMGAPASFKFFETTIERKRYNNLKELLNSTIIYQSITGLYESRKRLDD

SEQ ID NO: 236 - protein, 1327 aa, Listeria innocua ATCC 33091; identical to SEQ ID NO: 235

SEQ ID NO: 237 - protein, 1101 aa, Listeria innocua FSL S4-378
LKLYPGEKSTGMFAQFISLIVGSKGNFQKPFDLIEKSDIECAKDSYEEDLESLLALIGDEYAELFVAAKNAYSAVVLSSIITVAETETNAKLSASMIERFDTHEEDLGELKAFIKLHLPKHYEEIFSNTEKHGYAGYIDGTKQADFYKYMKTTLENIEGADYFIAKIEKENFLRKQRTFDNGAIPHQLHLEELEAILHQQAKYYPFLKENYDKIKSLVTFRIPYFVGPLANGQSEFAWLTRKADGEIRPWNIEEKVDFGKSAVDFIEKMTNKDTYLPKENVLPKHSLCYQKYLVYNELTKVRYINDQGKTSYFSGQEKEQIFNDLFKQKRKVKKKDLELFLRNMSHVESPTIEGLEDSFNSSYSTYHDLLKVGIKQEILDNPVNTEMLENIVKILTVFEDKRMIKEQLQQFSDVLDGVVLKKLERRHYTGWGRLSAKLLMGIRDKQSHLTILDYLMDDGLNRNLMQLINDSNLSFKSIIEKEQVTTADKDIQSIVADLAGSPAIKKGILQSLKIVDELVSVMGYPPQTIVVEMARENQTTGKGKNNSRPRYKSLEKAIKEFGSQILKEHPTDNQELKNNRLYLYYLQNGKDMYTGQDLDIHNLSNYDIDHIVPQSFITDNSIDNLVLTSSAGNREKGNDVPPLEIVQKRKVFWEKLYQGNLMSKRKFDYLTKAERGGLTEADKARFIHRQLVETRQITKNVANILHQRFNYGKDDHGNTMKQVRIVTLKSALVSQFRKQFQLYKVRGVNDYHHAHDAYLNGVVANTLLKVYPQLEPEFVYGDYHQFDWFKANKATAKKQFYTNIMLFFAQKDRIIDENGEILWDKKYLDTVKKVMSYRQMNIVKKTEIQKGEFSKATIKPKGNSSKLIPRKTNWDPMKYGGLDSPNMAYAVVIEYAKGKNKLVFEKKIIRVTIMERKAFEKDEKAFLEEQGYRQPKVLAKLPKYTLYECEEGRRRMLASANEAQKGNQQVLPNHLVTLLHHAANCEVSDGKSLDYIESNREMFAELLAHVSEFAKRYTLAEANLNKINQLFEQNKEGDIKAIAQSFVDLMAFNAMGAPASFKFFETTIERKRYNNLKELLNSTIIYQSITGLYESRKRLDD

SEQ ID NO: 238 - protein, 1327 aa, Listeria ivanovii
MRKPYTIGLDIGTNSVGWAVLTDQYNLVKRKMKVAGSAEKKQIKKNFWGVRLFDEGEVAAGRRMNRTTRRRIERRRNRIAYLQEIFAAEMAEVDANFFYRLEDSFYIESEKRHSRHPFFATIEEEVAYHEEYKTIYHLREKLVNSSDKADLRLVYLALAHIIKYRGNFLIEGMLDTKNTSVDEVFKQFIQTYNQIFASDIERLEENKEVAEILSEKLTRREKLDKILKLYTGEKSTGMFARFINLIIGSKGDFKKVFDLDEKAEIECAKDTYEEDLEALLAKIGDEYAEIFVAAKSTYNAVVLSNIITVTDTETKAKLSASMIERFDKHAKDLKRLKAFFKMQLPEKFNEVFNDIEKDGYAGYIDGTTQEKFYKYMKKMLANIDGADYFIDQIEEENFLRKQRTFDNGTIPHQLHLEELEAILHQQAKYYPFLRKDYEKIRSLVTFRIPYFIGPLANGQSDFAWLTRKADGEIRPWNIEEKVDFGKSAIDFIEKMTNKDTYLPKENVLPKHSLCYQKYMVYNELTKIRYIDDQGKTHHFSGQEKQQIFNGLFKQQRKVKKKDLERFLYTINHIESPTIEGVEDAFNSSFATYHDLQKGGVTQEILDNPLNADMLEEIVKILTVFEDKRMIKEQLQSFSDVLDGTILKKLERRHYTGWGRLSAKLLTGIRDKHSHLTILDYLMDDGLNRNLMQLINDSNLSFKSIIEKEQVSTADKGIQSIVAELAGSPAIKKGILQSLKIVDELVGIMGYPPQTIVVEMARENQTTGKGKNNSKPRFISLEKAIKEFGSQILKEHPTDNQCLKNDRLYLYYLQNGKDMYTGKELDIHNLSNYDIDHIIPQSFITDNSIDNRVLVSSTANREKGDNVPLLEVVRKRKAFWEKLYQAKLMSKRKFDYLTKAERGGLTEADKANFIQRQLVETRQITKNVANILYQRFNCKQDENGNEVEQVRIVTLKSTLVSQFRKQFQLYKVREVNDYHHAHDAYLNGVVANTLLKVYPQLEPEFVYGDYHQFDWFKANKATAKKQFYTNIMRFFAKENQIIDKNGEILWDNRYLDTIKKVLSYRQMNIVKKTEIQKGEFSNATVNPKGNSSKLISRKADWNPIKYGGFDGSNMAYSIVIEYEKRKKKTVIKKELIQINIMERVAFEKDQKAFLEEKGYYSPKVLTKIPKYTLYECENGRRRMLGSANEAQKGNQMVLPNHLMTLLYHAKNCEANDGESLAYIEMHREMFAELLAYISEFAKRYTLANDRLEKINMFFEQNKKGDIKVIAKSFDKLKVFNAFGAPRDFEFFETTIKRKRYYNIKELLNATIIYQSITGLYEARKRLED

SEQ ID NO: 239 - protein, 952 aa, Listeria ivanovii FSL F6-596
MKKMLANIDGADYFIDQIEEENFLRKQRTFDNGTIPHQLHLEELEAILHQQAKYYPFLRKDYEKIRSLVTFRIPYFIGPLANGQSDFAWLTRKADGEIRPWNIEEKVDFGKSAIDFIEKMTNKDTYLPKENVLPKHSLCYQKYMVYNELTKIRYIDDQGKTHHFSGQEKQQIFNGLFKQQRKVKKKDLERFLYTINHIESPTIEGVEDAFNSSFATYHDLQKGGVTQEILDNPLNADMLEEIVKILTVFEDKRMIKEQLQSFSDVLDGTILKKLERRHYTGWGRLSAKLLTGIRDKHSHLTILDYLMDDGLNRNLMQLINDSNLSFKSIIEKEQVSTADKGIQSIVAELAGSPAIKKGILQSLKIVDELVGIMGYPPQTIVVEMARENQTTGKGKNNSKPRFISLEKAIKEFGSQILKEHPTDNQCLKNDRLYLYYLQNGKDMYTGKELDIHNLSNYDIDHIIPQSFITDNSIDNRVLVSSTANREKGDNVPLLEVVRKRKAFWEKLYQAKLMSKRKFDYLTKAERGGLTEADKANFIQRQLVETRQITKNVANILYQRFNCKQDENGNEVEQVRIVTLKSTLVSQFRKQFQLYKVREVNDYHHAHDAYLNGVVANTLLKVYPQLEPEFVYGDYHQFDWFKANKATAKKQFYTNIMRFFAKENQIIDKNGEILWDNRYLDTIKKVLSYRQMNIVKKTEIQKGEFSNATVNPKGNSSKLISRKADWNPIKYGGFDGSNMAYSIVIEYEKRKKKTVIKKELIQINIMERVAFEKDQKAFLEEKGYYSPKVLTKIPKYTLYECENGRRRMLGSANEAQKGNQMVLPNHLMTLLYHAKNCEANDGESLAYIEMHREMFAELLAYISEFAKRYTLANDRLEKINMFFEQNKKGDIKVIAKSFDKLKVFNAFGAPRDFEFFETTIKRKRYYNIKELLNATIIYQSITGLYEARKRLED

SEQ ID NO: 240 - protein, 1327 aa, Listeria monocytogenes
MKNPYTIGLDIGTNSVGWAVLTNQYDLVKRKMKVAGNSDKKQIKKNFWGVRLFDDGQTAVDRRMNRTARRRIERRRNRISYLQEIFAVEMANIDANFFCRLNDSFYVDSEKRNSRHPFFATIEEEVAYHDNYRTIYHLREKLVNSSEKADLRLVYLALAHIIKYRGNFLIEGALDTKNTSVDEVYKQFIETYNQVFMSNIEKVEENIEVANILAGKFTRREKFERILQLYPGEKSTGMFAQFISLIVGSKGNFQKVFDLIEKTDIECAKDSYEEDLETLLAIIGDEYAELFVAAKNTYNAVVLSSIITVTDTETNAKLSASMIERFDAHEKDLVELKAFIKLNLPKQYEEIFSNAAIDGYAGYIDGTKQVDFYKYLKTILENIEGSDYFIAKIEEENFLRKQRTFDNGAIPHQLHLEELEAIIHQQAKYYPFLKEDYDKIKSLVTFRIPYFVGPLANGQSEFAWLTRKADGEIRPWNIEEKVDFGKSAVDFIEKMTNKDTYLPKENVLPKHSLCYQKYMVYNELTKIRYIDDQGKTNYFSGREKQQVFNDLFKQKRKVKKKDLELFLRNINHIESPTIEGLEDSFNASYATYHDLLKVGMKQEILDNPLNTEMLEDIVKILTVFEDKPMIKEQLQQFSDVLDGGVLKKLERRHYTGWGRLSAKLLVGIREKQSHLTILDYLMDDGLNRNLMQLINDSNLSFKSIIEKEQVSTTDKDLQSIVAELAGSPAIKKGILQSLKIVDELVSIMGYPPQTIVVEMARENQTTGKGKNNSKPRYKSLEKAIKEFGSQILKEHPTDNQELKNNRLYLYYLQNGKDMYTGQELDIHNLSNYDIDHIVPQSFITDNSIDNLVLTSSAGNREKGGDVPPLEIVRKRKVFWEKLYQGNLMSKRKFDYLTKAERGGLTEADKARFIHRQLVETRQITKNVANILYQRFNKETDNHGNTMEQVRIVTLKSALVSQFRKQFQLYKVREVNGYHHAHDAYLNGVVANTLLKVYPQLEPEFVYGEYHQFDWFKANKATAKKQFYTNIMLFFAQKERIIDENGEILWDKKYLETIKKVLDYRQMNIVKKTEIQKGEFSKATIKPKGNSSKLIPRKENWDPMKYGGLDSPNMAYAVIIEHAKGKKKIVIEKKLIQINIMERKMFEKDEEAFLEEKGYRHPKVLTKLPKYTLYECEKGRRRMLASANEAQKGNQLVLSNHLVSLLYHAKNCEASDGKSLKYIEAHRETFSELLAQVSEFATRYTLADANLSKINNLFEQNKEGDIKAIAQSFVDLMAFNAMGAPASFKFFEATIDRKRYTNLKELLSSTIIYQSITGLYESRKRLDD

SEQ ID NO: 241 - protein, 1327 aa, Listeria monocytogenes
MKNPYTIGLDIGTNSVGWAVLTDQYDLVKRKMKVAGNSDKKQIKKNFWGVRLFDDGQTAVDRRMNRTARRRIERRRNRISYLQEIFAVEMANIDANFFCRLNDSFYVDSEKRNSRHPFFATIEEEVAYHKNYRTIYHLREELVNSSEKADLRLVYLALAHIIKYRGNFLIEGALDTKNTSVDEVYKQFIQTYNQVFMSNIEKVEENTEVASILAGKFTRREKFERILRLYPGEKSTGMFAQFISLIVGNKGNFQKVFNLVEKTDIECAKDSYEEDLEALLAIIGDEYAELFVAAKNTYNAVVLSSIITVTATETNAKLSASMIERFDAHEKELGELKAFIKLHLPKQYQEIFNNAEIDGYAGYIDGTKQVDFYKYLKTTLENVEGADYFITKIEEENFLRKQRTFDNGVIPHQLHLEELEAILHQQAKYYPFLREGYDKIKSLVTFRIPYFVGPLANGQSEFAWLTRKDDGEIRPWNIEEKVDFGKSAVDFIEKMTNKDTYLPKENVLPKHSLCYQKYMVYNELTKIRYIDDQGKTNYFSGREKQQIFNDLFKQKRKVKKKDLELFLRNINHIESPTIEGLEDSFNASYATYHDLLKVGLKQEILDNPLNTEILEDIVKILTVFEDKRMIKEQLEQFSDVLDGVVLKKLERRHYTGWGRLSAKLLVGIRDKQSHLTILDYLMDDGLNRNLMQLINDSNLSFKSIIEKEQVSTTDKDLQSIVADLAGSPAIKKGILQSLKIVDELVSIMGYPPQTIVVEMARENQTTGKGKNNSKPRYKSLEKAIKDFGSQILKEHPTDNQELKNNRLYLYYLQNGKDIYTGQELDIHNLSNYDIDHIVPQSFITDNSIDNLVLTSSAGNREKGGDVPPLEIVRKRKVFWEKLYQGNLMSKRKFDYLTKAERGGLTEADKARFIHRQLVETRQITKNVANILHQRFNKETDNHGNTMEQVRIVTLKSALVSQFRKQFQLYKVREVNDYHHAHDAYLNGVVANTLLKVYPQLEPEFVYGEYHQFDWFKANKATAKKQFYTNIMLFFAQKERIIDENGEILWDKKYLETIKKVLDYRQINIVKKTEIQKGEFSKATIKPKGNSSKLIPRKENWDPMKYGGLDSPNMAYAVIIEHAKGKKKIVIEKKLIQINIMERKMFEKDEEAFLEEKGYHQPKVLTKLPKYTLYECEKGRRRMLSSANEAQKGNQLVLSNHLVSLLYHAKNCEASDGKSLKYIEAHRETFSELLAQVSEFATKYTLADANLSKINNLFEQNKEGDIKAIAQSFVDLMAFNAMGAPASFKFFEATIDRKRYTNLKELLSSTIIYQSITGLYESRKRLDD

SEQ ID NO: 242 - protein, 1327 aa, Listeria monocytogenes
MKNPYTIGLDIGTNSVGWAVLTDQYDLVKRKMKVAGNSDKKQIKKNFWGVRLFDDGQTAVDRRMNRTARRRIERRRNRISYLQEIFAVEMANIDANFFCRLNDSFYVDSEKRNSRHPFFATIEEEVAYHKNYRTIYHLREELVNSSEKADLRLVYLALAHIIKYRGNFLIEGALDTKNTSVDEVYKQFIQTYNQVFMSNIEKVEENTEVASILAGKFTRREKFERILRLYPGEKSTGMFAQFISLIVGNKGNFQKVFNLVEKTDIECAKDSYEEDLEALLAIIGDEYAELFVAAKNTYNAVVLSSIITVTATETNAKLSASMIERFDAHEKELGELKAFIKLHLPKQYQEIFNNAEIDGYAGYIDGTKQVDFYKYLKTTLENVEGADYFITKIEEENFLRKQRTFDNGVIPHQLHLEELEAILHQQAKYYPFLREGYDKIKSLVTFRIPYFVGPLANGQSEFAWLTRKDDGEIRPWNIEEKVDFGKSAVDFIEKMTNKDTYLPKENVLPKHSLCYQKYMVYNELTKIRYIDDQGKTNYFSGREKQQIFNDLFKQKRKVKKKDLELFLRNINHIESPTIEGLEDSFNASYATYHDLLKVGLKQEILDNPLNTEILEDIVKILTVFEDKRMIKEQLEQFSDVLDGVVLKKLERRHYTGWGRLSAKLLVGIRDKQSHLTILDYLMDDGLNRNLMQLINDSNLSFKSIIEKEQVSTTDKDLQSIVADLAGSPAIKKGILQSLKIVDELVSIMGYPPQTIVVEMARENQTTGKGKNNSKPRYKSLEKAIKDFGSQILKEHPTDNQELKNNRLYLYYLQNGKDIYTGQELDIHNLSNYDIDHIVPQSFITDNSIDNLVLTSSAGNREKGGDVPPLEIVRKRKVFWEKLYQGNLMSKRKFDYLTKAERGGLTEADKARFIHRQLVETRQITKNVANILHQRFNKETDNHGNTMEQVRIVTLKSALVSQFRKQFQLYKVREVNDYHHAHDAYLNGVVANTLLKVYPQLEPEFVYGEYHQFDWFKANKATAKKQFYTNIMLFFAQKERIIDENGEILWDKKYLETIKKVLDYRQINIVKKTEIQKGEFSKATIKPKGNSSKLIPRKENWDPVKYGGLDSPNMAYAVIIEHAKGKKKIVIEKKLIQINIMERKMFEKDEEAFLEEKGYHQPKVLTKLPKYTLYECEKGRRRMLSSANEAQKGNQLVLSNHLVSLLYHAKNCEASDGKSLKYIEAHRETFSELLAQVSEFATKYTLADANLSKINNLFEQNKEGDIKAIAQSFVDLMAFNAMGAPASFKFFEATIDRKRYTNLKELLSSTIIYQSITGLYESRKRLDD

SEQ ID NO: 243 - protein, 1327 aa, Listeria monocytogenes
MKKPYTIGLDIGTNSVGWAVLTDQYDLVKRKMKISGDSEKKQIKKNFWGVRLFEKGETAAKRRMSRTARRRIERRRNRISYLQEIFAIQMNEVDDNFFNRLKESFYAESDKKYNRHPFFGTVEEEVAYYKDFPTIYHLRKELIDSQKKADLRLVYLALAHIIKYRGHFLIEGALDTKNTSIDEMFKQFLQIYNQVFANDIEKTEKNQEVAQILAEKFTRKDKLDKILSLYPGEKTTGVFAQFVNIIVGSTGKFKKHFNLHEKKDINCAEDTYDTDLESLLAIIGDEFAEVFVAAKNAYNAVVLSNIITVTDSTTRAKLSASLIERFENHKEDLKKMKRFVRTYLPEKYDEIFDDTEKHGYAGYISGTKQADFYKYMKATLEKIEGADYFIAKIEEENFLRKQRTFDNGVIPHQLHLEELEAILHQQAKYYPFLREDYEKIKSLVTFRIPYFVGPLAKGQSEFAWLTRKADGEIRPWNIEEKVDFGKSAVDFIEKMTNKDTYLPKENVLPKHSLCYQKYMVYNELTKVRYIDDQGKTNYFSGQEKQQIFNDLFKQKRKVKKKDLELFLRNINQIESPTIEGLEDSFNASYATYHDLLKVGMKQEILDNPLNTEMLEDIVKILTVFEDKRMIKEQLQQFSDVLDGTVLKKLERRHYTGWGRLSAKLLVGIRDKQSHLTILDYLMDDGLNRNLMQLINDSNLSFKSIIEKEQVSTTDKDLQSIVAELAGSPAIKKGILQSLKIVDELVSVMGYPPQTIVVEMARENQTTNKGKNNSKPRYKSLEKAIKEFGSQILKEHPTDNQELKNNRLYLYYLQNGKDMYTGQELDIHNLSNYDIDHIVPQSFITDNSVDNLVLTSSAGNREKGDNVPPLEIVQKRKIFWEKLYQGNLMSKRKFDYLTKAERGGLTEADKARFIHRQLVETRQITKNVANILHQRFNYKTDGNKDTMETVRIVTLKSALVSQFRKQFQFYKVREVNDYHHAHDAYLNGVVANTLLKVYPQLEPEFVYGEYHQFGWFKANKATAKKQFYTNIMLFFAQKDRIIDENGEILWDKRYLETVKKVLGYRQMNIVKKTEIQKGEFSNVTPNPKGKSNKLIPRKKDWDPIKYGGFDGSKMAYAIIIEYEKQKRKVRIEKKLIQINIMEREAFEKDEKTFLEEKGYHQPKVLIKVPKYTLYECKNGRRRMLGSANEAHKGNQMLLPNHLMALLYHAEKYEAIDGESLAYIEVHRALFDELLAYISEFARKYTLSNDRLDEINMLYERNKDGDVKSIAESFVSLKKFNAFGVHQDFSFFGTKIERKRDRKLNELLNSTIIYQSITGLYESRKRLDN

SEQ ID NO: 244 - protein, 1327 aa, Listeria monocytogenes
MKNPYTIGLDIGTNSVGWAVLTDQYDLVKRKMKVAGNSDKKQIKKNFWGVRLFDEGETAADRRMNRTARRRIERRRNRISYLQEIFALEMANIDANFFCRLNDSFYVDSEKRNSRHPFFATIEEEVAYHKNYRTIYHLREELVNSSEKADLRLVYLALAHIIKYRGNFLIEGALDTKNTSVDGVYKQFIQTYNQVFISNIEKMEENTTVADILAGKFTRKEKLERILQLYPGEKSTGMFAQFISLIVGSKGNFQKVFDLVEKTDIECAKDSYEEDLEALLAIIGDEYAELFVAAKNTYNAVVLSSIITVTDTETNAKLSASMIERFDAHEKDLSELKAFIKLHLPKQYEEIFSNVAIDGYAGYIDGTKQVDFYKYLKTLLENIEGADYFIAKIEEENFLRKQRTFDNGAIPHQLHLEELEAILHQQAKYYPFLKEAYDKIKSLVTFRIPYFVGPLANGQSDFAWLTRKADGEIRPWNIEEKVDFGKSAVDFIEKMTNKDTYLPKENVLPKHSLYYQKYMVYNELTKVRYIDDQGKTNYFSGQEKQQIFNDYFKQKRKVSKKDLEQFLRNMSHIESPTIEGLEDSFNSSYATYHDLLKVGIKQEVLENPLNTEMLEDIVKILTVFEDKRMIKEQLQQFSDVLDGAVLKKLERRHYTGWGRLSAKLLVGIRDKQSHLTILDYLMDDGLNRNLMQLINDSNLSFKSIIEKEQVSTTDKDLQSIVADLAGSPAIKKGILQSLKIVDELVSIMGYPPQTIVVEMARENQTTVKGKNNSRPRYKSLEKAIKEFGSQILKEHPTDNQELRNNRLYLYYLQNGKDMYTGQELDIHNLSNYDIDHIVPQSFITDNSIDNLVLTSSAGNREKGDDVPPLEIVRKRKVFWEKLFQGNLMSKRKFDYLTKAERGGLTEADKATFIHRQLVETRQITKNVANILHQRFNNETDNHGNNMEQVRIVMLKSALVSQFRKQFQLYKVREVNDYHHAHDAYLNGVVANTLLKVYPQLEPEFVYGEYHQFDWFKANKATAKKQFYTNIMLFFAQKERIIDENGEILWDKKYLETIKKVLDYRQMNIVKKTEIQKGEFSKATIKPKGNSSKLIPRKENWDPMKYGGLDSPNMAYAVIIEHAKGKKKVVFEKKIIRITIMERKAFEKDEKSFLEKQGYRQPKVLTKLPKYTLYECENGRRRMLASANEAQKGNQQVLKGQLITLLHHAKNCEASDGKSLDYIESNREMFGELLAHVSEFAKRYTLADANLSKINQLFEQNKDNDIKVIAQSFVNLMAFNAMGAPASFKFFEATIERKRYTNLKELLSATIIYQSITGLYEARKRLDG

SEQ ID NO: 245 - protein, 1327 aa, Listeria monocytogenes
MKNPYTIGLDIGTNSVGWAVLTNQYDLVKRKMKVAGNSDKKQIKKNFWGVRLFDDGQTAVDRRMNRTARRRIERRRNRISYLQEIFAVEMANIDANFFCRLNDSFYVDSEKRNSRHPFFATIEEEVAYHKNYRTIYHLREELVNSSEKADLRLVYLALAHIIKYRGNFLIEGALDTKNTSVDGVYEQFIQTYNQVFMSNIEKVEENIEVANILAGKFTRREKFERILQLYPGEKSTGMFAQFISLIVGSKGNFQKVFDLIEKTDIECAKDSYEEDLEALLAIIGDEYAELFVAAKNTYNAVVLSSIITVTATETNAKLSASMIERFDAHEKDLGELKAFIKLHLPKQYQEIFNNAAIDGYAGYIDGTKQVDFYKYLKTILENIEGADYFIAKIEEENFLRKQRTFDNGAIPHQLHLEELEAIIHQQAKYYPFLREDYEKIKSLVTFRIPYFVGPLAKGQSEFAWLTRKADGEIRPWNIEEKVDFGKSAVDFIEKMTNKDTYLPKENVLPKHSLCYQKYMVYNELTKVRYIDDQGKTNYFSGQEKQQIFNDLFKQKRKVKKKDLELFLRNINHIESPTIEGLEDSFNASYATYHDLLKVGMKQEILDNPLNTEMLEDIVKILTVFEDKPMIKEQLQQFSDVLDGGVLKKLERRHYTGWGRLSAKLLVGIREKQSHLTILDYLMDDGLNRNLMQLINDSNLSFKSIIEKEQVSTTDKDLQSIVADLAGSPAIKKGILQSLKIVDELVSIMGYPPQTIVVEMARENQTTGKGKNNSKPRYKSLEKAIKEFGSKILKEHPTDNQELKNNRLYLYYLQNGKDMYTGQELDIHNLSNYDIDHIVPQSFITDNSIDNLVLTSSAGNREKGGDVPPLEIVRKRKVFWEKLYQGNLMSKRKFDYLTKAERGGLTDADKARFIHRQLVETRQITKNVANILHQRFNNETDNHGNTMEQVRIVTLKSALVSQFRKQFQLYKVREVNDYHHAHDAYLNGVVANTLLKVYPQLEPEFVYGEYHQFDWFKANKATAKKQFYTNIMLFFGQKERIIDENGEILWDKKYLETIKKVLDYRQMNIVKKTEIQKGEFSKATIKPKGNSSKLIPRKENWDPMKYGGLDSPNMAYAVIIEHAKGKKKLIFEKKIIRITIMERKMFEKDEEAFLEEKGYRHPKVLTKLPKYTLYECEKGRRRMLASANEAQKGNQLVLSNHLVSLLYHAKNCEASDGKSLKYIEAHRETFSELLAQVSEFATRYTLADANLSKINNLFEQNKEGDIQAIAQSFVDLMAFNAMGAPASFKFFEATIDRKRYTNLKELLSSTIIYQSITGLYESRKRLDD

SEQ ID NO: 246 - protein, 1327 aa, Listeria monocytogenes
MKNPYTIGLDIGTNSVGWAVLTNQYDLVKRKMKVAGNSDKKQIKKNFWGVRLFDDGQTAVDRRMNRTARRRIERRRNRISYLQEIFAVEMANIDANFFCRLNDSFYVDSEKRNSRHPFFATIEEEVAYHKNYRTIYHLREELVNSSEKADLRLVYLALAHIIKYRGNFLIEGALDTKNTSVDGVYEQFILTYNQVFMSNIEKVEENIEVANILAGKFTRREKFERILQLYPGEKSTGMFAQFISLIVGSKGNFQKVFDLIEKTDIECAKDSYEEDLETLLAIIGDEYAELFVAAKNTYNAVVLSSIITVTDTETNAKLSASMIERFDAHEKDLVELKAFIKLNLPKQYEEIFSNAAIDGYAGYIDGTKQVDFYKYLKTTLENVEGADYFITKIEEENFLRKQRTFDNGVIPHQLHLEELEAILHQQAKYYPFLREDYEKIKSLVTFRIPYFVGPLAKGQSEFAWLTRKADGEIRPWNIEEKVDFGKSAVDFIEKMTNKDTYLPKENVLPKHSLCYQKYMVYNELTKIRYIDDQGKTNYFSGQEKQQIFNDLFKQKRKVKKKDLELFLRNINHVESPTIEGLEDSFNASYATYHDLMKVGIKQEILDNPLNTEMLEDIVKILTVFEDKRMIKEQLQQFSDVLDGTVLKKLERRHYTGWGRLSAKLLVGIRDKQSHLTILDYLMDDGLNRNLMQLINDSNLSFKSIIEKEQVSTADKDLQSIVADLAGSPAIKKGILQSLKVVEELVSVMGYPPQTIVVEMARENQTTNKGKNNSKPRYKSLEKAIKEFGSQILKEHPTDNQELKNNRLYLYYLQNGKDMYTGQELDIHNLSNYDIDHIVPQSFITDNSIDNLVLTSSAGNREKGDNVPPLEIVQKRKIFWEKLYQGNLMSKRKFDYLTKAERGGLTEADKARFIHRQLVETRQITKNVANILHQRFNYKTDDNEDTMEPVRIVTLKSALVSQFRKQFQLYKVREVNDYHHAHDAYLNGVVANTLLKVYPQLEPEFVYGEYHQFDWFKANKATAKKQFYTNIMLFFAQKERIIDENGEILWDKKYLETIKKVLNYRQMNIVKKTEIQKGEFSNQNPKPRGDSSKLIPKKTNLNPIKYGGFEGSNMAYAIIIEHEKRKKKVTIEKKLIQINIMERKAFEKDEKVFLEGKGYHQPKVLTKLPKYALYECENGRRRMLGSANEVHKGNQMLLPNHLMTLLYHAEKREAIDGESLAYIEAHKAVFGELLAHISEFARKYTLANDKLDEINMLYERNKDGDVKSIAESFVSLKKFNAFGVHKDFNFFGTTIKRKRDRKLKELLNSTIIYQSITGLYESRKRLDS

SEQ ID NO: 247 - protein, 1327 aa, Listeria monocytogenes
MKNPYTIGLDIGTNSVGWAVLTDQYDLVKRKMKVAGNSDKKQIKKNFWGVRLFDDGQTAVDRRMNRTARRRIERRRNRISYLQEIFAVEMANIDANFFCRLNDSFYVDSEKRNSRHPFFATIEEEVAYHKNYRTIYHLREELVNSSEKADLRLVYLALAHIIKYRGNFLIEGALDTKNTSVDGVYEQFIQTYNQVFMSNIEKVEENIEVANILAGKFTRREKFERILQLYPGEKSTGMFAQFISLIVGSKGNFQKVFDLIEKTDIECAKDSYEEDLETLLAIIGDEYAELFVAAKNTYNAVVLSSIITVNDTETNAKLSASMIERFDAHEKDLVELKAFIKLNLPKQYEEIFSNAAIDGYAGYIDGTKQVDFYKYLKTILENIEGSDYFIAKIEEENFLRKQRTFDNGAIPHQLHLEELEAIIHQQAKYYTFLKEDYDKIKSLVTFRIPYFVGPLANGQSEFAWLTRKADGEIRPWNIEEKVDFGKSAVDFIEKMTNKDTYLPKENVLPKHSLCYQKYMVYNELTKVRYIDDQGKTNYFSGQEKQQIFNDLFKQKRKVKKKDLELFLRNINQIESPTIEGLEDSFNASYATYHDLLKVGMKQEILDNPLNTEMLEDIVKILTVFEDKRMIKEQLQQFSDVLDGVVLKKLERRHYTGWGRLSAKLLVGIRDKQSHLTILEYLMDDGLNRNLMQLINDSNLSFKSIIEKEQVSTTDKDLQSIVAELAGSPAIKKGILQSLKIVDELVSIMGYPPQTIVVEMARENQTTGKGKNNSKPRYKSLEKAIKEFGSQILKEHPTDNQELKNNRLYLYYLQNGKDMYTGQELDIHNLSNYDIDHIVPQSFITDNSIDNLVLTSSAGNREKGGDVPPLEIVRKRKVFWEKLYQGNLMSKRKFDYLTKAERGGLTEADKARFIHRQLVETRQITKNVANILHQRFNKETDNHGNTMEQVRIVTLKSALVSQFRKQFQLYKVREVNDYHHAHDAYLNGVVANTLLKVYPQLEPEFVYGEYHQFDWFKANKATAKKQFYTNIMLFFAQKERIIDENGEILWDKKYLETIKKVLDYRQMNIVKKTEIQKGEFSKATIKPKGNSSKLIPRKENWDPMKYGGLDSPNMAYAVIIEHAKGKKRIVIEKKLIQINIMERKMFEKDEEAFLEEKGYRHPKVLTKLPKYTLYECEKGRRRMLASANEAQKGNQLVLSNHLVSLLYHAKNCEASDGKSLKYIEAHRETFSELLAQVSEFATRYTLADANLSKINNLFEQNKEGDIKAIAQSFVDLMAFNAMGAPASFKFFEATIDRKRYTNLKELLSSTIIYQSITGLYESRKRLDD

SEQ ID NO: 248 - protein, 1327 aa, Listeria monocytogenes
MKKPYTIGLDIGTNSVGWAVLTDQYDLVKRKMKISGDSEKKQIKKNFWGVRLFEKGETAAKRRMSRTARRRIERRRNRISYLQEIFAIQMNEVDDNFFNRLKESFYAESDKKYNRHPFFGTVEEEVAYYKDFPTIYHLRKELIDSQKKADLRLVYLALAHIIKYRGHFLIEGALDTKNTSIDEMFKQFLQIYNQVFANDIEKTEKNQEVAQILAEKFTRKDKLDKILSLYPGEKTTGVFAQFVNIIVGSTGKFKKHFNLHEKKDINCAEDTYDTDLESLLAIIGDEFAEVFVAAKNAYNAVVLSNIITVTDSTTRAKLSASLIERFENHKEDLKKMKRFVRTYLPEKYDEIFDDTEKHGYAGYISGTKQADFYKYMKATLEKIEGADYFIAKIEEENFLRKQRTFDNGVIPHQLHLEELEAILHQQAKYYPFLREDYEKIKSLVTFRIPYFVGPLAKGQSEFAWLTRKADGEIRPWNIEEKVDFGKSAVDFIEKMTNKDTYLPKENVLPKHSLCYQKYMVYNELTKVRYIDDQGKTNYFSGQEKQQIFNDLFKQKRKVKKKDLELFLRNINQIESPTIEGLEDSFNASYATYHDLLKVGMKQEILDNPLNTEMLEDIVKILTVFEDKRMIKEQLQQFSDVLDGTVLKKLERRHYTGWGRLSAKLLVGIRDKQSHLTILDYLMDDGLNRNLMQLINDSNLSFKSIIEKEQVSTADKDLQSIVADLAGSPAIKKGILQSLKIVDELVSVMGYPPQTIVVEMARENQTTNKGKNNSKPRYKSLEKAIKEFGSQILKEHPTDNQELKNNRLYLYYLQNGKDMYTGQELDIHNLSNYDIDHIVPQSFITDNSVDNLVLTSSAGNREKGDNVPPLEIVQKRKIFWEKLYQGNLMSKRKFDYLTKAERGGLTEADKARFIHRQLVETRQITKNVANILHQRFNYKTDGNKDTMETVRIVTLKSALVSQFRKQFQFYKVREVNDYHHAHDAYLNGVVANTLLKVYPQLEPEFVYGEYHQFDWFKANKATAKKQFYTNIMLFFAQKDRIIDENGEILWDKRYLETVKKVLGYRQMNIVKKTEIQKGEFSNVTPNPKGKSNKLIPRKKDWDPIKYGGFDGSKMAYAIIIEYEKQKRKVRIEKKLIQINIMEREAFEKDEKTFLEEKGYHQPKVLIKVPKYTLYECENGRRRMLGSANEAHKGNQMLLPNHLMALLYHAEKYEAIDGESLAYIEVHRALFDELLAYISEFARKYTLSNDRLDEINMLYERNKDGDVKSIAESFVSLKKFNAFGVHQDFSFFGTKIERKRDRKLNELLNSTIIYQSITGLYESRKRLDN

SEQ ID NO: 249 - protein, 1327 aa, Listeria monocytogenes
MKNPYTIGLDIGTNSVGWAVLTNQYDLVKRKMKVAGNSDKKQIKKNFWGVRLFDDGQTAVDRRMNRTARRRIERRRNRISYLQEIFAVEMANIDANFFCRLNDSFYVDSEKRNSRHPFFATIEEEVAYHKNYRTIYHLREELVNSSEKADLRLVYLALAHIIKYRGNFLIEGALDTKNTSVDGVYEQFIQTYNQVFMSNIEKVEENIEVANILARKFTRREKFERILQLYPGEKSTGMFAQFISLIVGSKGNFQKVFDLIEKTDIECAKDSYEEDLETLLAIIGDEYAELFVAAKNTYNAVVLSSIITVTDTETNAKLSASMIERFDAHEKDLVELKAFIKLNLPKQYEEIFSNAAIDGYAGYIDGTKQVDFYKYLKTILENIEGADYFIAKIEEENFLRKQRTFDNGAIPHQLHLEELEAIIHQQAKYYPFLREDYEKIKSLVTFRIPYFVGPLAKGQSEFAWLTRKADGEIRPWNIEEKVDFGKSAVDFIEKMTNKDTYLPKENVLPKHSLCYQKYMVYNELTKIRYIDDQGKTNYFSGQEKQQIFNDLFKQKRKVKKKDLELFLRNINHVESPTIEGLEDSFNASYATYHDLMKVGIKQEILDNPLNTEMLEDIVKILTVFEDKRMIKEQLQQFSDVLDGTVLKKLERRHYTGWGRLSAKLLVGIRDKQSHLTILDYLMDDGLNRNLMQLINDSNLSFKSIIEKEQVSTADKDLQSIVADLAGSPAIKKGILQSLKVVEELVSVMGYPPQTIVVEMARENQTTNKGKNNSKPRYKSLEKAIKEFGSQILKEHPTDNQELKNNRLYLYYLQNGKDMYTGQELDIHNLSNYDIDHIVPQSFITDNSIDNLVLTSSAGNREKGDNVPPLEIVQKRKIFWEKLYQGNLMSKRKFDYLTKAERGGLTEADKARFIHRQLVETRQITKNVANILHQRFNYKTDDNEDTMEPVRIVTLKSALVSQFRKQFQLYKVREVNDYHHAHDAYLNGVVANTLLKVYPQLEPEFVYGEYHQFDWFKANKATAKKQFYTNIMLFFAQKERIIDENGEILWDKKYLETIKKVLNYRQMNIVKKTEIQKGEFSNQNPKPRGDSSKLIPKKTNLNPIKYGGFEGSNMAYAIIIEHEKRKKKVTIEKKLIQINIMERKAFEKDEKVFLEGKGYHQPKVLTKLPKYALYECENGRRRMLGSANEVHKGNQMLLPNHLMTLLYHAEKREAIDGESLAYIEAHKAVFGELLAHISEFARKYTLANDKLDEINMLYERNKDGDVKSIAESFVSLKKFNAFGVHKDFNFFGTTIKRKRDRKLKELLNSTIIYQSITGLYESRKRLDS

SEQ ID NO: 250 - protein, 1327 aa, Listeria monocytogenes; identical to SEQ ID NO: 245

SEQ ID NO: 251 - protein, 1327 aa, Listeria monocytogenes; identical to SEQ ID NO: 249

SEQ ID NO: 252 - protein, 781 aa, Listeria monocytogenes FSL F2-208
  misc_feature (721)..(721): Xaa can be any naturally occurring amino acid
IFNDLFKQKRKVKKKDLELFLRNINQIESPTIEGLEDSFNASYATYHDLLKVGMKQEILDNPLNTEMLEDIVKILTVFEDKRMIKEQLQQFSDVLDGVVLKKLERRHYTGWGRLSAKLLVGIRDKQSHLTILEYLMDDGLNRNLMQLINDSNLSFKSIIEKEQVSTTDKDLQSIVADLAGSPAIKKGILQSLKIVDELVSIMGYPPQTIVVEMARENQTTVKGKNNSRPRYKSLEKAIKEFGSQILKEHPTDNQELKNNRLYLYYLQNGKDIYTGQELDIHNLSNYDIDHIVPQSFITDNSIDNLVLTSSAGNREKGDDVPPLEIVRKRKVFWEKLYQGNLMSKRKFDYLTKAERGGLTEADKARFIHRQLVETRQITKNVANILHQRFNNETDNHGNTMEQVRIVTLKSALVSQFRKQFQLYKVREVNDYHHAHDAYLNGVVANTLLKVYPQLEPEFVYGEYHQFDWFKANKATAKKQFYTNIMLFFAQKERIIDENGEILWDKKYLETIKKVLDYRQMNIVKKTEIQKGEFSKATIKPKGNSSKLIPRKENWDPMKYGGLDSPNMAYAVIIEHAKGKKKIVIEKKLIQINIMERKMFEKDEEAFLEEKGYRHPKVLTKLPKYTLYECEKGRRRMLASANEAQKGNQLVLSNHLVSLLYHAKNCEASDGKSLKYTEAHRETFSELLAQVSEFATRYTLADANLSKINNLFEQNKEGDIKXIAQSFVDLMVFNAMGAPASFKFFEATIDRKRYTNLKELLSSTIIYQSITGLYESRKRLDD

SEQ ID NO: 253 - protein, 1327 aa, Listeria seeligeri
MKKPYTIGLDIGTNSVGWAALTDQYDLVKRKMKVAGNSEKKQIKKNLWGVRLVDEGKTAAHRRVNRTTRRRIERRRNRISYLQEIFTAEMFEVDANFFYRLEDSFYIESEKRQSRHPFFATIEEEVAYHENYRTIYHLREKLVNSSDKADLRLVYLALAHIIKYRGNFLIEGKLDTKNTSVDEVFKQFIKTYNQVFASDIERIEENNEVAKIFSEKLTKREKLDKILNLYPNEKSTDLFAQFISLIIGSKGNFKKFFNLTEKTDIECAKDSYEEDLEVLLARVGDEYAEIFVAAKNAYNAVVLSSIITVSNTETKAKLSASMIERFDKHDKDLKRMKAFFKVRLPENFNEVFNDVEKDGYAGYIEGTKQEAFYKYMKKMLEHVEGADYFINQIEEENFLRKQRTFDNGAIPHQLHLEELEAILHQQAKYYPFLKVDYEKIKSLVTFRIPYFVGPLANGQSEFSWLTRKADGEIRPWNIEEKVDFGKSAIDFIEKMTNKDTYLPKENVLPKHSMCYQKYMVYNELTKIRYTDDQGKTHYFSGQEKQQIFNDLFKQKRKVKKKDLELFLYNMNHVESPTVEGVEDAFNSSFTTYHDLQKVGVPQEILDDPLNTEMLEEIIKILTVFEDKRMINERLQEFSNVLDEAVLKKLERRHYTGWGRLSAKLLIGIRDKESHLTILDYLMDDKHNRNLMQLINDSNLSFKSIIEKEQVSTADKDIQSIVADLAGSPAIKKGILQSLKIVDELVGIMGYPPQTIVVEMARENQTTGKGKNNSKPRFTSLEKAIKELGSQILKEHPTDNQGLKNDRLYLYYLQNGKDMYTGQELDIHNLSNYDIDHVVPQSFITDNSIDNRVLASSAANREKGDNVPSLEVVRKRKVYWEKLYQAKLMSKRKFDYLTKAERGGLTEADKARFIHRQLVETRQITKNVANILHQRFNCKKDESGNVIEQVRIVTLKAALVSQFRKQFQLYKVREVNDYHHAHDAYLNCVVANTLLKVYPQLEPEFVYGDYHQFDWFKANKATAKKQFYTNIMLFFAKKDRIIDENGEILWDKKYLDTIKKVLNYRQMNIVKKTEIQKGEFSNATANPKGNSSKLIPRKADWDPIKYGGFDGSNMAYAIVIEHEKRKKKTVIKKELIQINIMERTAFEKDQKEFLEGKGYRNPKVITKIPKYTLYECENGRRRMLGSANEAQKGNQMVLPNHLMTLLYHAKNCEASDGKSLAYIESHREMFAELLDSISEFASRYTLADANLEKINTIFEQNKSGDVKVIAQSFVNLLEFNAMGAPASFKYFETNIERKRYNNLKELLNATIIYQSITGLYEARKRLDD

SEQ ID NO: 254 - protein, 1359 aa, Artificial Sequence; identical to SEQ ID NO: 228
  Synthetic Polypeptide

SEQ ID NO: 255 - protein, 1290 aa, Roseburia hominis
IVDYCIGLDLGTGSVGWAVVDMNHRLMKRNGKHLWGSRLFSNAETAATRRSSRSIRRRYNKRRERIRLLRAILQDMVLEKDPTFFIRLEHTSFLDEEDKAKYLGDNYNLFIDEDFNDYTYYHKYPTIYHLRKALCESTEKADPRLIYLALHHIVKYRGNFLYEGQKFNMDASNIEDKLSDVFTQFADFNNIPYEDDKKNLEILEILKKPLSKKAKVDEVMALISPEKEFKSAYKELVTGIAGNKMNVTKMILCESIKQGDSEIKLKFSDSNYDDQFSEVENDLGEYVEFIDSLHNIYSWVELQTIMGATHTDNASISEAMVSRYNKHHEDLQLLKKCIKDNVPKKYFDMFRNDSEKVKGYYNYINRKAPVDEFYKFVKKCIEKVDTPEAKQILHDIELENFLLKQNSRTNGSVPYQMQLDEMIKIIDNQAKYYPVLKEKREQLLSILTFRIPYYFGPLETSEHAWIKRLEGKENQRILPWNYQDTVDVDATAEGFIKRMRSYCTYFPDEEVLPKNSLIVSKYEVYNELNKIRVDDKLLEVDVKNDIYNELFMKNKTVTEKKLKNWLVNNQCCRKDAEIKGFQKENQFSTSLTPWIDFTNIFGKIDQSNFDLIEKIIYDLTVFEDKKIMKRRLKKKYALPDDKIKQILKLKYKDWSRLSKKLLDGIVADSVTVLDVLESRLNLMEIINDKELGYAQMIEEASSCPKDGKFTYEEVAKLAGSPALKRGIWQSLQIVEEITKVMKCRPKYIYIEFERSEEKERTESKIKKLENVYKDEQTSVLEELKGFDNTKKISSDSLFLYFTQLGKCMYSGKKLDIDSLDKYQIDHIVPQSLVKDDSFDNRVLVLPSENQRKLDDLVVPFDIRDKMYRFWKLLFDHELISPKKFYSLIKTEYTERDEERFINRQLVETRQITKNVTQIIEDHYSTTKVAAIRANLSHEFRVKNHIYKNRDINDYHHAHDAYIVALIGGFMRDRYPNMHDSKAVYSEYMKMFRNKNDQKGFVINSMNYPYEVDGKLIWNPDLINEIKKCFYYKDCYCTTKLDQKSGQMFNTVLPNDAHSAKGAVIPVNKNRKDVNKYGGFSGLQYVIAAIEGTKKKGKKLVKVRKLSGIPLYLKQADIKEQIEYVEKEEKLSDVKIIKNNIPLNQLIEIDGRQYLLTSECVNAMQLVLNEEQCKLIADIYNAIYKQDFDGLDNMLMIQLYLQLIDKLKTLYPIYMGIVEKFEKFVSISKEEKANVIQMLIIMHKGPQNGNIIYDDFNVGKRIGRLNGRTFYLNIEFISQSPTGIYTKKYKL

SEQ ID NO: 256 - protein, 1292 aa, Sharpea azabuensis
KDIRYSIGLDIGTNSVGWAVMDEHYELLKKGNHHMWGSRLFDAAEPAATRRASRSIRRRYNKRRERIRLLRDLLGDMVMEVDPTFFIRLLNVSFLDEEDKQKNLGDNYNLFIEKDFNDKTYYDKYPTIYHLRKELCENKEKADPRLIYLALHHIVKYRGNFLYEGQSFTMDNSDIEERLNSAIEKFMSINEFDNRIVSDINSMIAVLSKIYQRSKKADDLLKIMNPTKEEKAAYKEFTKALVGLKFNISKMILAQEVKKGDTDIVLEFSNANYDSTIDELQSELGEYIEFIEMLHNIYSWVELQAILGATHTDNPSISAAMVERYEEHKKDLRVLKKVIREELPDKYNEVFRKDNRKLHNYLGYIKYDTPVEEFYKYIKGLLAKVDTDEAREILERIDLEKFMLKQNSRTNGSIPYQMQKDEMIQIIDNQSVYYPQLKENRDKLISILEFRIPYYFGPLAHSEFAWIKKFEDKQKERILPWNYDQIVDIDATAEGFIERMKNTGTYFPDEPVMAKNSLTVSKFEVLNELNKIRINGKLIAVETKKELLSDLFMKNKTITDKKLKDWLVTHQYYDINEELKIEGYQKDLQFSTSLAPWIDFTKIFGEINASNYQLIEKIIYDISIFEDKKILKRRLKKVYQLDDLLVDKILKLNYTGWSRLSEKLLTGMTADKATVLFVLESNKNLMEIINDEKLGYKQIIEESNMQDIEGPFKYDEVKKLAGSPAIKRGIWQALLVVREITKFMKHEPSHIYIEFAREEQKVRKESKIAKLQKIYENLQTQVYESLKKEDAKKRMETDALYLYYLQMGKSMYSGKPLDIDKLSTYQIDHILPQSLIKDDSFDNRVLVLPEENQWKLDSETVPFEIRNKMIGFWQMLHENGLMSNKKFFSLIRTDFSDKDKERFINRQLVETRQIIKNVAVIINDHYTNTNIVTVRAELSHQFRERYKIYKNRDINDFHHAHDAYIACIVGQFMHQNFEHLDAKIIYGQYKKNYKKNYGFILNSMNHLQSDIDTGEVMWDPAKIGKIKSCFYYKDVYVTKKLEQNSGTLFNTVLPNDAHSEKGATVPLNKYRADVHKYGGFGNVQSIIVAIEGKKKKGKKLIDVRKLTSIPLHLKNAPVEEQLSYIASPEHEDLIDVRIVKEILKNQLIEIDGGLYYVTSEYVTARQLSLNEQSCKLISEIYAAMLKKRYEYLDEEEIFDLYLQLLQKMDTLYPAYKGIAKRFFDFKNIDVVEKCDVIQILIIMHAGPMNGNIMYDDFKFTNRIGRFTHKNIDLKTTFISTSVTGLFSKKYKL

SEQ ID NO: 257 - protein, 1359 aa, Artificial Sequence; identical to SEQ ID NO: 228
  Synthetic Polypeptide

SEQ ID NO: 258 - protein, 1359 aa, Artificial Sequence
  Synthetic Polypeptide
MDKKYSIGLAIGTNSVGWAVITDEYKVPSKKFKVLGNTDRHSIKKNLIGALLFDSGETAEATRLKRTARRRYTRRKNRICYLQEIFSNEMAKVDDSFFHRLEESFLVEEDKKHERHPIFGNIVDEVAYHEKYPTIYHLRKKLVDSTDKADLRLIYLALAHMIKFRGHFLIEGDLNPDNSDVDKLFIQLVQTYNQLFEENINASGVDAKAILSARLSKSRRLENLIAQLPGEKKNGLFGNLIALSLGLTPNFKSNFDLAEDAKLQLSKDTYDDDLDNLLAQIGDQYADLFLAAKNLSDAILLSDILRVNTEITKAPLSASMIKRYDEHHQDLTLLKALVRQQLPEKYKEIFFDQSKNGYAGYIDGGASQEEFYKFIKPILEKMDGTEELLVKLNREDLLRKQRTFDNGSIPHQIHLGELHAILRRQEDFYPFLKDNREKIEKILTFRIPYYVGPLARGNSRFAWMTRKSEETITPWNFEEVVDKGASAQSFIERMTNFDKNLPNEKVLPKHSLLYEYFTVYNELTKVKYVTEGMRKPAFLSGEQKKAIVDLLFKTNRKVTVKQLKEDYFKKIECFDSVEISGVEDRFNASLGTYHDLLKIIKDKDFLDNEENEDILEDIVLTLTLFEDREMIEERLKTYAHLFDDKVMKQLKRRRYTGWGRLSRKLINGIRDKQSGKTILDFLKDGFANRNFMQLIHDDSLTFKEDIQKAQVSGQGDSLHEHIANLAGSPAIKKGILQTVKVVDELVKVMGRHKPENIVIEMARENQTTQKGQKNSRERMKRIEEGIKELGSQILKEHPVENTQLQNEKLYLYYLQNGRDMYVDQELDINRLSDYDVDAIVPQSFLKDDSIDNKVLTRSDKNRGKSDNVPSEEVVKKMKNYWRQLLNAKLITQRKFDNLTKAERGGLSELDKAGFIKRQLVETRQITKHVAQILDSRMNTKYDENDKLIREVKVITLKSKLVSDFRKDFQFYKVREINNYHHAHDAYLNAVVGTALIKKYPKLESEFVYGDYKVYDVSEQEIGKATAKYFFYSNIMNFFKTEITLANGEIRKRPLIETNGETGEIVWDKGRDFATVRKVLSMPQVNIVKKTEVQTGGFSKESILPKRNSDKLIARKKDWDPKKYGGFDSPTVAYSVLVVAKVEKGKSKKLKSVKELLGITIMERSSFEKNPIDFLEAKGYKEVKKDLIIKLPKYSLFELENGRKRMLASGELQKGNELALPSKYVNFLYLASHYEKLKGSPEDNEQKQLFVEQHKHYLDEIIEQISEFSKRVILADANLDKVLSAYNKHRDKPIREQAENIIHLFTLTNLGAPAAFKYFDTTIDRKRYTSTKEVLDATLIHQSITGLYETRIDLSQLGGD

SEQ ID NO: 259 - protein, 1359 aa, Artificial Sequence; identical to SEQ ID NO: 11
  Synthetic Polypeptide

SEQ ID NO: 260 - protein, 1359 aa, Artificial Sequence; identical to SEQ ID NO: 258
  Synthetic Polypeptide

SEQ ID NO: 261 - protein, 1300 aa, Francisella novicida
MSIYQEFVNKYSLSKTLRFELIPQGKTLENIKARGLILDDEKRAKDYKKAKQIIDKYHQFFIEEILSSVCISEDLLQNYSDVYFKLKKSDDDNLQKDFKSAKDTIKKQISEYIKDSEKFKNLFNQNLIDAKKGQESDLILWLKQSKDNGIELFKANSDITDIDEALEIIKSFKGWTTYFKGFHENRKNVYSSNDIPTSIIYRIVDDNLPKFLENKAKYESLKDKAPEAINYEQIKKDLAEELTFDIDYKTSEVNQRVFSLDEVFEIANFNNYLNQSGITKFNTIIGGKFVNGENTKRKGINEYINLYSQQINDKTLKKYKMSVLFKQILSDTESKSFVIDKLEDDSDVVTTMQSFYEQIAAFKTVEEKSIKETLSLLFDDLKAQKLDLSKIYFKNDKSLTDLSQQVFDDYSVIGTAVLEYITQQIAPKNLDNPSKKEQELIAKKTEKAKYLSLETIKLALEEFNKHRDIDKQCRFEEILANFAAIPMIFDEIAQNKDNLAQISIKYQNQGKKDLLQASAEDDVKAIKDLLDQTNNLLHKLKIFHISQSEDKANILDKDEHFYLVFEECYFELANIVPLYNKIRNYITQKPYSDEKFKLNFENSTLANGWDKNKEPDNTAILFIKDDKYYLGVMNKKNNKIFDDKAIKENKGEGYKKIVYKLLPGANKMLPKVFFSAKSIKFYNPSEDILRIRNHSTHTKNGSPQKGYEKFEFNIEDCRKFIDFYKQSISKHPEWKDFGFRFSDTQRYNSIDEFYREVENQGYKLTFENISESYIDSVVNQGKLYLFQIYNKDFSAYSKGRPNLHTLYWKALFDERNLQDVVYKLNGEAELFYRKQSIPKKITHPAKEAIANKNKDNPKKESVFEYDLIKDKRFTEDKFFFHCPITINFKSSGANKFNDEINLLLKEKANDVHILSIDRGERHLAYYTLVDGKGNIIKQDTFNIIGNDRMKTNYHDKLAAIEKDRDSARKDWKKINNIKEMKEGYLSQVVHEIAKLVIEYNAIVVFEDLNFGFKRGRFKVEKQVYQKLEKMLIEKLNYLVFKDNEFDKTGGVLRAYQLTAPFETFKKMGKQTGIIYYVPAGFTSKICPVTGFVNQLYPKYESVSKSQEFFSKFDKICYNLDKGYFEFSFDYKNFGDKAAKGKWTIASFGSRLINFRNSDKNHNWDTREVYPTKELEKLLKDYSIEYGHGECIKAAICGESDKKFFAKLTSVLNTILQMRNSKTGTELDYLISPVADVNGNFFDSRQAPKNMPQDADANGAYHIGLKGLMLLGRIKNNQEGKKLNLVIKNEEYFEFVQNRNN

SEQ ID NO: 262 - protein, 1300 aa, Francisella novicida
MSIYQEFVNKYSLSKTLRFELIPQGKTLENIKARGLILDDEKRAKDYKKAKQIIDKYHQFFIEEILSSVCISEDLLQNYSDVYFKLKKSDDDNLQKDFKSAKDTIKKQISEYIKDSEKFKNLFNQNLIDAKKGQESDLILWLKQSKDNGIELFKANSDITDIDEALEIIKSFKGWTTYFKGFHENRKNVYSSNDIPTSIIYRIVDDNLPKFLENKAKYESLKDKAPEAINYEQIKKDLAEELTFDIDYKTSEVNQRVFSLDEVFEIANFNNYLNQSGITKFNTIIGGKFVNGENTKRKGINEYINLYSQQINDKTLKKYKMSVLFKQILSDTESKSFVIDKLEDDSDVVTTMQSFYEQIAAFKTVEEKSIKETLSLLFDDLKAQKLDLSKIYFKNDKSLTDLSQQVFDDYSVIGTAVLEYITQQIAPKNLDNPSKKEQELIAKKTEKAKYLSLETIKLALEEFNKHRDIDKQCRFEEILANFAAIPMIFDEIAQNKDNLAQISIKYQNQGKKDLLQASAEDDVKAIKDLLDQTNNLLHKLKIFHISQSEDKANILDKDEHFYLVFEECYFELANIVPLYNKIRNYITQKPYSDEKFKLNFENSTLANGWDKNKEPDNTAILFIKDDKYYLGVMNKKNNKIFDDKAIKENKGEGYKKIVYKLLPGANKMLPKVFFSAKSIKFYNPSEDILRIRNHSTHTKNGSPQKGYEKFEFNIEDCRKFIDFYKQSISKHPEWKDFGFRFSDTQRYNSIDEFYREVENQGYKLTFENISESYIDSVVNQGKLYLFQIYNKDFSAYSKGRPNLHTLYWKALFDERNLQDVVYKLNGEAELFYRKQSIPKKITHPAKEAIANKNKDNPKKESVFEYDLIKDKRFTEDKFFFHCPITINFKSSGANKFNDEINLLLKEKANDVHILSIARGERHLAYYTLVDGKGNIIKQDTFNIIGNDRMKTNYHDKLAAIEKDRDSARKDWKKINNIKEMKEGYLSQVVHEIAKLVIEYNAIVVFEDLNFGFKRGRFKVEKQVYQKLEKMLIEKLNYLVFKDNEFDKTGGVLRAYQLTAPFETFKKMGKQTGIIYYVPAGFTSKICPVTGFVNQLYPKYESVSKSQEFFSKFDKICYNLDKGYFEFSFDYKNFGDKAAKGKWTIASFGSRLINFRNSDKNHNWDTREVYPTKELEKLLKDYSIEYGHGECIKAAICGESDKKFFAKLTSVLNTILQMRNSKTGTELDYLISPVADVNGNFFDSRQAPKNMPQDADANGAYHIGLKGLMLLGRIKNNQEGKKLNLVIKNEEYFEFVQNRNN

SEQ ID NO: 263 - protein, 1300 aa, Francisella novicida
MSIYQEFVNKYSLSKTLRFELIPQGKTLENIKARGLILDDEKRAKDYKKAKQIIDKYHQFFIEEILSSVCISEDLLQNYSDVYFKLKKSDDDNLQKDFKSAKDTIKKQISEYIKDSEKFKNLFNQNLIDAKKGQESDLILWLKQSKDNGIELFKANSDITDIDEALEIIKSFKGWTTYFKGFHENRKNVYSSNDIPTSIIYRIVDDNLPKFLENKAKYESLKDKAPEAINYEQIKKDLAEELTFDIDYKTSEVNQRVFSLDEVFEIANFNNYLNQSGITKFNTIIGGKFVNGENTKRKGINEYINLYSQQINDKTLKKYKMSVLFKQILSDTESKSFVIDKLEDDSDVVTTMQSFYEQIAAFKTVEEKSIKETLSLLFDDLKAQKLDLSKIYFKNDKSLTDLSQQVFDDYSVIGTAVLEYITQQIAPKNLDNPSKKEQELIAKKTEKAKYLSLETIKLALEEFNKHRDIDKQCRFEEILANFAAIPMIFDEIAQNKDNLAQISIKYQNQGKKDLLQASAEDDVKAIKDLLDQTNNLLHKLKIFHISQSEDKANILDKDEHFYLVFEECYFELANIVPLYNKIRNYITQKPYSDEKFKLNFENSTLANGWDKNKEPDNTAILFIKDDKYYLGVMNKKNNKIFDDKAIKENKGEGYKKIVYKLLPGANKMLPKVFFSAKSIKFYNPSEDILRIRNHSTHTKNGSPQKGYEKFEFNIEDCRKFIDFYKQSISKHPEWKDFGFRFSDTQRYNSIDEFYREVENQGYKLTFENISESYIDSVVNQGKLYLFQIYNKDFSAYSKGRPNLHTLYWKALFDERNLQDVVYKLNGEAELFYRKQSIPKKITHPAKEAIANKNKDNPKKESVFEYDLIKDKRFTEDKFFFHCPITINFKSSGANKFNDEINLLLKEKANDVHILSIDRGERHLAYYTLVDGKGNIIKQDTFNIIGNDRMKTNYHDKLAAIEKDRDSARKDWKKINNIKEMKEGYLSQVVHEIAKLVIEYNAIVVFADLNFGFKRGRFKVEKQVYQKLEKMLIEKLNYLVFKDNEFDKTGGVLRAYQLTAPFETFKKMGKQTGIIYYVPAGFTSKICPVTGFVNQLYPKYESVSKSQEFFSKFDKICYNLDKGYFEFSFDYKNFGDKAAKGKWTIASFGSRLINFRNSDKNHNWDTREVYPTKELEKLLKDYSIEYGHGECIKAAICGESDKKFFAKLTSVLNTILQMRNSKTGTELDYLISPVADVNGNFFDSRQAPKNMPQDADANGAYHIGLKGLMLLGRIKNNQEGKKLNLVIKNEEYFEFVQNRNN

SEQ ID NO: 264 - protein, 1300 aa, Francisella novicida
MSIYQEFVNKYSLSKTLRFELIPQGKTLENIKARGLILDDEKRAKDYKKAKQIIDKYHQFFIEEILSSVCISEDLLQNYSDVYFKLKKSDDDNLQKDFKSAKDTIKKQISEYIKDSEKFKNLFNQNLIDAKKGQESDLILWLKQSKDNGIELFKANSDITDIDEALEIIKSFKGWTTYFKGFHENRKNVYSSNDIPTSIIYRIVDDNLPKFLENKAKYESLKDKAPEAINYEQIKKDLAEELTFDIDYKTSEVNQRVFSLDEVFEIANFNNYLNQSGITKFNTIIGGKFVNGENTKRKGINEYINLYSQQINDKTLKKYKMSVLFKQILSDTESKSFVIDKLEDDSDVVTTMQSFYEQIAAFKTVEEKSIKETLSLLFDDLKAQKLDLSKIYFKNDKSLTDLSQQVFDDYSVIGTAVLEYITQQIAPKNLDNPSKKEQELIAKKTEKAKYLSLETIKLALEEFNKHRDIDKQCRFEEILANFAAIPMIFDEIAQNKDNLAQISIKYQNQGKKDLLQASAEDDVKAIKDLLDQTNNLLHKLKIFHISQSEDKANILDKDEHFYLVFEECYFELANIVPLYNKIRNYITQKPYSDEKFKLNFENSTLANGWDKNKEPDNTAILFIKDDKYYLGVMNKKNNKIFDDKAIKENKGEGYKKIVYKLLPGANKMLPKVFFSAKSIKFYNPSEDILRIRNHSTHTKNGSPQKGYEKFEFNIEDCRKFIDFYKQSISKHPEWKDFGFRFSDTQRYNSIDEFYREVENQGYKLTFENISESYIDSVVNQGKLYLFQIYNKDFSAYSKGRPNLHTLYWKALFDERNLQDVVYKLNGEAELFYRKQSIPKKITHPAKEAIANKNKDNPKKESVFEYDLIKDKRFTEDKFFFHCPITINFKSSGANKFNDEINLLLKEKANDVHILSIDRGERHLAYYTLVDGKGNIIKQDTFNIIGNDRMKTNYHDKLAAIEKDRDSARKDWKKINNIKEMKEGYLSQVVHEIAKLVIEYNAIVVFEDLNFGFKRGRFKVEKQVYQKLEKMLIEKLNYLVFKDNEFDKTGGVLRAYQLTAPFETFKKMGKQTGIIYYVPAGFTSKICPVTGFVNQLYPKYESVSKSQEFFSKFDKICYNLDKGYFEFSFDYKNFGDKAAKGKWTIASFGSRLINFRNSDKNHNWDTREVYPTKELEKLLKDYSIEYGHGECIKAAICGESDKKFFAKLTSVLNTILQMRNSKTGTELDYLISPVADVNGNFFDSRQAPKNMPQDAAANGAYHIGLKGLMLLGRIKNNQEGKKLNLVIKNEEYFEFVQNRNN

SEQ ID NO: 265 - protein, 1300 aa, Francisella novicida
MSIYQEFVNKYSLSKTLRFELIPQGKTLENIKARGLILDDEKRAKDYKKAKQIIDKYHQFFIEEILSSVCISEDLLQNYSDVYFKLKKSDDDNLQKDFKSAKDTIKKQISEYIKDSEKFKNLFNQNLIDAKKGQESDLILWLKQSKDNGIELFKANSDITDIDEALEIIKSFKGWTTYFKGFHENRKNVYSSNDIPTSIIYRIVDDNLPKFLENKAKYESLKDKAPEAINYEQIKKDLAEELTFDIDYKTSEVNQRVFSLDEVFEIANFNNYLNQSGITKFNTIIGGKFVNGENTKRKGINEYINLYSQQINDKTLKKYKMSVLFKQILSDTESKSFVIDKLEDDSDVVTTMQSFYEQIAAFKTVEEKSIKETLSLLFDDLKAQKLDLSKIYFKNDKSLTDLSQQVFDDYSVIGTAVLEYITQQIAPKNLDNPSKKEQELIAKKTEKAKYLSLETIKLALEEFNKHRDIDKQCRFEEILANFAAIPMIFDEIAQNKDNLAQISIKYQNQGKKDLLQASAEDDVKAIKDLLDQTNNLLHKLKIFHISQSEDKANILDKDEHFYLVFEECYFELANIVPLYNKIRNYITQKPYSDEKFKLNFENSTLANGWDKNKEPDNTAILFIKDDKYYLGVMNKKNNKIFDDKAIKENKGEGYKKIVYKLLPGANKMLPKVFFSAKSIKFYNPSEDILRIRNHSTHTKNGSPQKGYEKFEFNIEDCRKFIDFYKQSISKHPEWKDFGFRFSDTQRYNSIDEFYREVENQGYKLTFENISESYIDSVVNQGKLYLFQIYNKDFSAYSKGRPNLHTLYWKALFDERNLQDVVYKLNGEAELFYRKQSIPKKITHPAKEAIANKNKDNPKKESVFEYDLIKDKRFTEDKFFFHCPITINFKSSGANKFNDEINLLLKEKANDVHILSIARGERHLAYYTLVDGKGNIIKQDTFNIIGNDRMKTNYHDKLAAIEKDRDSARKDWKKINNIKEMKEGYLSQVVHEIAKLVIEYNAIVVFADLNFGFKRGRFKVEKQVYQKLEKMLIEKLNYLVFKDNEFDKTGGVLRAYQLTAPFETFKKMGKQTGIIYYVPAGFTSKICPVTGFVNQLYPKYESVSKSQEFFSKFDKICYNLDKGYFEFSFDYKNFGDKAAKGKWTIASFGSRLINFRNSDKNHNWDTREVYPTKELEKLLKDYSIEYGHGECIKAAICGESDKKFFAKLTSVLNTILQMRNSKTGTELDYLISPVADVNGNFFDSRQAPKNMPQDADANGAYHIGLKGLMLLGRIKNNQEGKKLNLVIKNEEYFEFVQNRNN

SEQ ID NO: 266 - protein, 1300 aa, Francisella novicida
MSIYQEFVNKYSLSKTLRFELIPQGKTLENIKARGLILDDEKRAKDYKKAKQIIDKYHQFFIEEILSSVCISEDLLQNYSDVYFKLKKSDDDNLQKDFKSAKDTIKKQISEYIKDSEKFKNLFNQNLIDAKKGQESDLILWLKQSKDNGIELFKANSDITDIDEALEIIKSFKGWTTYFKGFHENRKNVYSSNDIPTSIIYRIVDDNLPKFLENKAKYESLKDKAPEAINYEQIKKDLAEELTFDIDYKTSEVNQRVFSLDEVFEIANFNNYLNQSGITKFNTIIGGKFVNGENTKRKGINEYINLYSQQINDKTLKKYKMSVLFKQILSDTESKSFVIDKLEDDSDVVTTMQSFYEQIAAFKTVEEKSIKETLSLLFDDLKAQKLDLSKIYFKNDKSLTDLSQQVFDDYSVIGTAVLEYITQQIAPKNLDNPSKKEQELIAKKTEKAKYLSLETIKLALEEFNKHRDIDKQCRFEEILANFAAIPMIFDEIAQNKDNLAQISIKYQNQGKKDLLQASAEDDVKAIKDLLDQTNNLLHKLKIFHISQSEDKANILDKDEHFYLVFEECYFELANIVPLYNKIRNYITQKPYSDEKFKLNFENSTLANGWDKNKEPDNTAILFIKDDKYYLGVMNKKNNKIFDDKAIKENKGEGYKKIVYKLLPGANKMLPKVFFSAKSIKFYNPSEDILRIRNHSTHTKNGSPQKGYEKFEFNIEDCRKFIDFYKQSISKHPEWKDFGFRFSDTQRYNSIDEFYREVENQGYKLTFENISESYIDSVVNQGKLYLFQIYNKDFSAYSKGRPNLHTLYWKALFDERNLQDVVYKLNGEAELFYRKQSIPKKITHPAKEAIANKNKDNPKKESVFEYDLIKDKRFTEDKFFFHCPITINFKSSGANKFNDEINLLLKEKANDVHILSIARGERHLAYYTLVDGKGNIIKQDTFNIIGNDRMKTNYHDKLAAIEKDRDSARKDWKKINNIKEMKEGYLSQVVHEIAKLVIEYNAIVVFEDLNFGFKRGRFKVEKQVYQKLEKMLIEKLNYLVFKDNEFDKTGGVLRAYQLTAPFETFKKMGKQTGIIYYVPAGFTSKICPVTGFVNQLYPKYESVSKSQEFFSKFDKICYNLDKGYFEFSFDYKNFGDKAAKGKWTIASFGSRLINFRNSDKNHNWDTREVYPTKELEKLLKDYSIEYGHGECIKAAICGESDKKFFAKLTSVLNTILQMRNSKTGTELDYLISPVADVNGNFFDSRQAPKNMPQDAAANGAYHIGLKGLMLLGRIKNNQEGKKLNLVIKNEEYFEFVQNRNN

SEQ ID NO: 267 - protein, 1300 aa, Francisella novicida
MSIYQEFVNKYSLSKTLRFELIPQGKTLENIKARGLILDDEKRAKDYKKAKQIIDKYHQFFIEEILSSVCISEDLLQNYSDVYFKLKKSDDDNLQKDFKSAKDTIKKQISEYIKDSEKFKNLFNQNLIDAKKGQESDLILWLKQSKDNGIELFKANSDITDIDEALEIIKSFKGWTTYFKGFHENRKNVYSSNDIPTSIIYRIVDDNLPKFLENKAKYESLKDKAPEAINYEQIKKDLAEELTFDIDYKTSEVNQRVFSLDEVFEIANFNNYLNQSGITKFNTIIGGKFVNGENTKRKGINEYINLYSQQINDKTLKKYKMSVLFKQILSDTESKSFVIDKLEDDSDVVTTMQSFYEQIAAFKTVEEKSIKETLSLLFDDLKAQKLDLSKIYFKNDKSLTDLSQQVFDDYSVIGTAVLEYITQQIAPKNLDNPSKKEQELIAKKTEKAKYLSLETIKLALEEFNKHRDIDKQCRFEEILANFAAIPMIFDEIAQNKDNLAQISIKYQNQGKKDLLQASAEDDVKAIKDLLDQTNNLLHKLKIFHISQSEDKANILDKDEHFYLVFEECYFELANIVPLYNKIRNYITQKPYSDEKFKLNFENSTLANGWDKNKEPDNTAILFIKDDKYYLGVMNKKNNKIFDDKAIKENKGEGYKKIVYKLLPGANKMLPKVFFSAKSIKFYNPSEDILRIRNHSTHTKNGSPQKGYEKFEFNIEDCRKFIDFYKQSISKHPEWKDFGFRFSDTQRYNSIDEFYREVENQGYKLTFENISESYIDSVVNQGKLYLFQIYNKDFSAYSKGRPNLHTLYWKALFDERNLQDVVYKLNGEAELFYRKQSIPKKITHPAKEAIANKNKDNPKKESVFEYDLIKDKRFTEDKFFFHCPITINFKSSGANKFNDEINLLLKEKANDVHILSIDRGERHLAYYTLVDGKGNIIKQDTFNIIGNDRMKTNYHDKLAAIEKDRDSARKDWKKINNIKEMKEGYLSQVVHEIAKLVIEYNAIVVFADLNFGFKRGRFKVEKQVYQKLEKMLIEKLNYLVFKDNEFDKTGGVLRAYQLTAPFETFKKMGKQTGIIYYVPAGFTSKICPVTGFVNQLYPKYESVSKSQEFFSKFDKICYNLDKGYFEFSFDYKNFGDKAAKGKWTIASFGSRLINFRNSDKNHNWDTREVYPTKELEKLLKDYSIEYGHGECIKAAICGESDKKFFAKLTSVLNTILQMRNSKTGTELDYLISPVADVNGNFFDSRQAPKNMPQDAAANGAYHIGLKGLMLLGRIKNNQEGKKLNLVIKNEEYFEFVQNRNN

SEQ ID NO: 268 - protein, 1300 aa, Francisella novicida
MSIYQEFVNKYSLSKTLRFELIPQGKTLENIKARGLILDDEKRAKDYKKAKQIIDKYHQFFIEEILSSVCISEDLLQNYSDVYFKLKKSDDDNLQKDFKSAKDTIKKQISEYIKDSEKFKNLFNQNLIDAKKGQESDLILWLKQSKDNGIELFKANSDITDIDEALEIIKSFKGWTTYFKGFHENRKNVYSSNDIPTSIIYRIVDDNLPKFLENKAKYESLKDKAPEAINYEQIKKDLAEELTFDIDYKTSEVNQRVFSLDEVFEIANFNNYLNQSGITKFNTIIGGKFVNGENTKRKGINEYINLYSQQINDKTLKKYKMSVLFKQILSDTESKSFVIDKLEDDSDVVTTMQSFYEQIAAFKTVEEKSIKETLSLLFDDLKAQKLDLSKIYFKNDKSLTDLSQQVFDDYSVIGTAVLEYITQQIAPKNLDNPSKKEQELIAKKTEKAKYLSLETIKLALEEFNKHRDIDKQCRFEEILANFAAIPMIFDEIAQNKDNLAQISIKYQNQGKKDLLQASAEDDVKAIKDLLDQTNNLLHKLKIFHISQSEDKANILDKDEHFYLVFEECYFELANIVPLYNKIRNYITQKPYSDEKFKLNFENSTLANGWDKNKEPDNTAILFIKDDKYYLGVMNKKNNKIFDDKAIKENKGEGYKKIVYKLLPGANKMLPKVFFSAKSIKFYNPSEDILRIRNHSTHTKNGSPQKGYEKFEFNIEDCRKFIDFYKQSISKHPEWKDFGFRFSDTQRYNSIDEFYREVENQGYKLTFENISESYIDSVVNQGKLYLFQIYNKDFSAYSKGRPNLHTLYWKALFDERNLQDVVYKLNGEAELFYRKQSIPKKITHPAKEAIANKNKDNPKKESVFEYDLIKDKRFTEDKFFFHCPITINFKSSGANKFNDEINLLLKEKANDVHILSIARGERHLAYYTLVDGKGNIIKQDTFNIIGNDRMKTNYHDKLAAIEKDRDSARKDWKKINNIKEMKEGYLSQVVHEIAKLVIEYNAIVVFADLNFGFKRGRFKVEKQVYQKLEKMLIEKLNYLVFKDNEFDKTGGVLRAYQLTAPFETFKKMGKQTGIIYYVPAGFTSKICPVTGFVNQLYPKYESVSKSQEFFSKFDKICYNLDKGYFEFSFDYKNFGDKAAKGKWTIASFGSRLINFRNSDKNHNWDTREVYPTKELEKLLKDYSIEYGHGECIKAAICGESDKKFFAKLTSVLNTILQMRNSKTGTELDYLISPVADVNGNFFDSRQAPKNMPQDAAANGAYHIGLKGLMLLGRIKNNQEGKKLNLVIKNEEYFEFVQNRNN

SEQ ID NO: 269 - protein, 887 aa, Natronobacterium gregoryi
MTVIDLDSTTTADELTSGHTYDISVTLTGVYDNTDEQHPRMSLAFEQDNGERRYITLWKNTTPKDVFTYDYATGSTYIFTNIDYEVKDGYENLTATYQTTVENATAQEVGTTDEDETFAGGEPLDHHLDDALNETPDDAETESDSGHVMTSFASRDQLPEWTLHTYTLTATDGAKTDTEYARRTLAYTVRQELYTDHDAAPVATDGLMLLTPEPLGETPLDLDCGVRVEADETRTLDYTTAKDRLLARELVEEGLKRSLWDDYLVRGIDEVLSKEPVLTCDEFDLHERYDLSVEVGHSGRAYLHINFRHRFVPKLTLADIDDDNIYPGLRVKTTYRPRRGHIVWGLRDECATDSLNTLGNQSVVAYHRNNQTPINTDLLDAIEAADRRVVETRRQGHGDDAVSFPQELLAVEPNTHQIKQFASDGFHQQARSKTRLSASRCSEKAQAFAERLDPVRLNGSTVEFSSEFFTGNNEQQLRLLYENGESVLTFRDGARGAHPDETFSKGIVNPPESFEVAVVLPEQQADTCKAQWDTMADLLNQAGAPPTRSETVQYDAFSSPESISLNVAGAIDPSEVDAAFVVLPPDQEGFADLASPTETYDELKKALANMGIYSQMAYFDRFRDAKIFYTRNVALGLLAAAGGVAFTTEHAMPGDADMFIGIDVSRSYPEDGASGQINIAATATAVYKDGTILGHSSTRPQLGEKLQSTDVRDIMKNAILGYQQVTGESPTHIVIHRDGFMNEDLDPATEFLNEQGVEYDIVEIRKQPQTRLLAVSDVQYDTPVKSIAAINQNEPRATVATFGAPEYLATRDGGGLPRPIQIERVAGETDIETLTRQVYLLSQSHIQVHNSTARLPITTAYADQASTHATKGYLVQTGAFESNVGFL

SEQ ID NO: 270 - protein, 198 aa, Homo sapiens [sequence omitted]

SEQ ID NO: 271 - protein, 198 aa, Mus musculus
MDSLLMKQKKFLYHFKNVRWAKGRHETYLCYVVKRRDSATSCSLDFGHLRNKSGCHVELLFLRYISDWDLDPGRCYRVTWFTSWSPCYDCARHVAEFLRWNPNLSLRIFTARLYFCEDRKAEPEGLRRLHRAGVQIGIMTFKDYFYCWNTFVENRERTFKAWEGLHENSVRLTRQLRRILLPLYEVDDLRDAFRMLGF

SEQ ID NO: 272 - protein, 198 aa, Canis lupus
MDSLLMKQRKFLYHFKNVRWAKGRHETYLCYVVKRRDSATSFSLDFGHLRNKSGCHVELLFLRYISDWDLDPGRCYRVTWFTSWSPCYDCARHVADFLRGYPNLSLRIFAARLYFCEDRKAEPEGLRRLHRAGVQIAIMTFKDYFYCWNTFVENREKTFKAWEGLHENSVRLSRQLRRILLPLYEVDDLRDAFRTLGL

SEQ ID NO: 273 - protein, 199 aa, Bos taurus
MDSLLKKQRQFLYQFKNVRWAKGRHETYLCYVVKRRDSPTSFSLDFGHLRNKAGCHVELLFLRYISDWDLDPGRCYRVTWFTSWSPCYDCARHVADFLRGYPNLSLRIFTARLYFCDKERKAEPEGLRRLHRAGVQIAIMTFKDYFYCWNTFVENHERTFKAWEGLHENSVRLSRQLRRILLPLYEVDDLRDAFRTLGL

SEQ ID NO: 274 - protein, 429 aa, Mus musculus
MGPFCLGCSHRKCYSPIRNLISQETFKFHFKNLGYAKGRKDTFLCYEVTRKDCDSPVSLHHGVFKNKDNIHAEICFLYWFHDKVLKVLSPREEFKITWYMSWSPCFECAEQIVRFLATHHNLSLDIFSSRLYNVQDPETQQNLCRLVQEGAQVAAMDLYEFKKCWKKFVDNGGRRFRPWKRLLTNFRYQDSKLQEILRPCYIPVPSSSSSTLSNICLTKGLPETRFCVEGRRMDPLSEEEFYSQFYNQRVKHLCYYHRMKPYLCYQLEQFNGQAPLKGCLLSEKGKQHAEILFLDKIRSMELSQVTITCYLTWSPCPNCAWQLAAFKRDRPDLILHIYTSRLYFHWKRPFQKGLCSLWQSGILVDVMDLPQFTDCWTNFVNPKRPFWPWKGLEIISRRTQRRLRRIKESWGLQDLVNDFGNLQLGPPMS

SEQ ID NO: 275 - protein, 429 aa, Rattus rattus
MGPFCLGCSHRKCYSPIRNLISQETFKFHFKNLRYAIDRKDTFLCYEVTRKDCDSPVSLHHGVFKNKDNIHAEICFLYWFHDKVLKVLSPREEFKITWYMSWSPCFECAEQVLRFLATHHNLSLDIFSSRLYNIRDPENQQNLCRLVQEGAQVAAMDLYEFKKCWKKFVDNGGRRFRPWKKLLTNFRYQDSKLQEILRPCYIPVPSSSSSTLSNICLTKGLPETRFCVERRRVHLLSEEEFYSQFYNQRVKHLCYYHGVKPYLCYQLEQFNGQAPLKGCLLSEKGKQHAEILFLDKIRSMELSQVIITCYLTWSPCPNCAWQLAAFKRDRPDLILHIYTSRLYFHWKRPFQKGLCSLWQSGILVDVMDLPQFTDCWTNFVNPKRPFWPWKGLEIISRRTQRRLHRIKESWGLQDLVNDFGNLQLGPPMS

SEQ ID NO: 276 - protein, 370 aa, Macaca mulatta
MVEPMDPRTFVSNFNNRPILSGLNTVWLCCEVKTKDPSGPPLDAKIFQGKVYSKAKYHPEMRFLRWFHKWRQLHHDQEYKVTWYVSWSPCTRCANSVATFLAKDPKVTLTIFVARLYYFWKPDYQQALRILCQKRGGPHATMKIMNYNEFQDCWNKFVDGRGKPFKPRNNLPKHYTLLQATLGELLRHLMDPGTFTSNFNNKPWVSGQHETYLCYKVERLHNDTWVPLNQHRGFLRNQAPNIHGFPKGRHAELCFLDLIPFWKLDGQQYRVTCFTSWSPCFSCAQEMAKFISNNEHVSLCIFAARIYDDQGRYQEGLRALHRDGAKIAMMNYSEFEYCWDTFVDRQGRPFQPWDGLDEHSQALSGRLRAI

SEQ ID NO: 277 - protein, 384 aa, Pan troglodytes
MKPHFRNPVERMYQDTFSDNFYNRPILSHRNTVWLCYEVKTKGPSRPPLDAKIFRGQVYSKLKYHPEMRFFHWFSKWRKLHRDQEYEVTWYISWSPCTKCTRDVATFLAEDPKVTLTIFVARLYYFWDPDYQEALRSLCQKRDGPRATMKIMNYDEFQHCWSKFVYSQRELFEPWNNLPKYYILLHIMLGEILRHSMDPPTFTSNFNNELWVRGRHETYLCYEVERLHNDTWVLLNQRRGFLCNQAPHKHGFLEGRHAELCFLDVIPFWKLDLHQDYRVTCFTSWSPCFSCAQEMAKFISNNKHVSLCIFAARIYDDQGRCQEGLRTLAKAGAKISIMTYSEFKHCWDTFVDHQGCPFQPWDGLEEHSQALSGRLRAILQNQGN

SEQ ID NO: 278 - protein, 377 aa, Chlorocebus sabaeus
MNPQIRNMVEQMEPDIFVYYFNNRPILSGRNTVWLCYEVKTKDPSGPPLDANIFQGKLYPEAKDHPEMKFLHWFRKWRQLHRDQEYEVTWYVSWSPCTRCANSVATFLAEDPKVTLTIFVARLYYFWKPDYQQALRILCQERGGPHATMKIMNYNEFQHCWNEFVDGQGKPFKPRKNLPKHYTLLHATLGELLRHVMDPGTFTSNFNNKPWVSGQRETYLCYKVERSHNDTWVLLNQHRGFLRNQAPDRHGFPKGRHAELCFLDLIPFWKLDDQQYRVTCFTSWSPCFSCAQKMAKFISNNKHVSLCIFAARIYDDQGRCQEGLRTLHRDGAKIAVMNYSEFEYCWDTFVDRQGRPFQPWDGLDEHSQALSGRLRAI

SEQ ID NO: 279 - protein, 384 aa, Homo sapiens
MKPHFRNTVERMYRDTFSYNFYNRPILSRRNTVWLCYEVKTKGPSRPPLDAKIFRGQVYSELKYHPEMRFFHWFSKWRKLHRDQEYEVTWYISWSPCTKCTRDMATFLAEDPKVTLTIFVARLYYFWDPDYQEALRSLCQKRDGPRATMKIMNYDEFQHCWSKFVYSQRELFEPWNNLPKYYILLHIMLGEILRHSMDPPTFTFNFNNEPWVRGRHETYLCYEVERMHNDTWVLLNQRRGFLCNQAPHKHGFLEGRHAELCFLDVIPFWKLDLDQDYRVTCFTSWSPCFSCAQEMAKFISKNKHVSLCIFTARIYDDQGRCQEGLRTLAEAGAKISIMTYSEFKHCWDTFVDHQGCPFQPWDGLDEHSQDLSGRLRAILQNQEN

SEQ ID NO: 280 - protein, 373 aa, Homo sapiens
MKPHFRNTVERMYRDTFSYNFYNRPILSRRNTVWLCYEVKTKGPSRPRLDAKIFRGQVYSQPEHHAEMCFLSWFCGNQLPAYKCFQITWFVSWTPCPDCVAKLAEFLAEHPNVTLTISAARLYYYWERDYRRALCRLSQAGARVKIMDDEEFAYCWENFVYSEGQPFMPWYKFDDNYAFLHRTLKEILRNPMEAMYPHIFYFHFKNLRKAYGRNESWLCFTMEVVKHHSPVSWKRGVFRNQVDPETHCHAERCFLSWFCDDILSPNTNYEVTWYTSWSPCPECAGEVAEFLARHSNVNLTIFTARLYYFWDTDYQEGLRSLSQEGASVEIMGYKDFKYCWENFVYNDDEPFKPWKGLKYNFLFLDSKLQEILE

SEQ ID NO: 281 - protein, 382 aa, Homo sapiens
MNPQIRNPMERMYRDTFYDNFENEPILYGRSYTWLCYEVKIKRGRSNLLWDTGVFRGQVYFKPQYHAEMCFLSWFCGNQLPAYKCFQITWFVSWTPCPDCVAKLAEFLSEHPNVTLTISAARLYYYWERDYRRALCRLSQAGARVTIMDYEEFAYCWENFVYNEGQQFMPWYKFDENYAFLHRTLKEILRYLMDPDTFTFNFNNDPLVLRRRQTYLCYEVERLDNGTWVLMDQHMGFLCNEAKNLLCGFYGRHAELRFLDLVPSLQLDPAQIYRVTWFISWSPCFSWGCAGEVRAFLQENTHVRLRIFAARIYDYDPLYKEALQMLRDAGAQVSIMTYDEFEYCWDTFVYRQGCPFQPWDGLEEHSQALSGRLRAILQNQGN

SEQ ID NO: 282 - protein, 190 aa, Homo sapiens
MNPQIRNPMKAMYPGTFYFQFKNLWEANDRNETWLCFTVEGIKRRSVVSWKTGVFRNQVDSETHCHAERCFLSWFCDDILSPNTKYQVTWYTSWSPCPDCAGEVAEFLARHSNVNLTIFTARLYYFQYPCYQEGLRSLSQEGVAVEIMDYEDFKYCWENFVYNDNEPFKPWKGLKTNFRLLKRRLRESLQ

SEQ ID NO: 283 - protein, 199 aa, Homo sapiens
MEASPASGPRHLMDPHIFTSNFNNGIGRHKTYLCYEVERLDNGTSVKMDQHRGFLHNQAKNLLCGFYGRHAELRFLDLVPSLQLDPAQIYRVTWFISWSPCFSWGCAGEVRAFLQENTHVRLRIFAARIYDYDPLYKEALQMLRDAGAQVSIMTYDEFKHCWDTFVDHQGCPFQPWDGLDEHSQALSGRLRAILQNQGN

SEQ ID NO: 284 - protein, 200 aa, Homo sapiens
MALLTAETFRLQFNNKRRLRRPYYPRKALLCYQLTPQNGSTPTRGYFENKKKCHAEICFINEIKSMGLDETQCYQVTCYLTWSPCSSCAWELVDFIKAHDHLNLGIFASRLYYHWCKPQQKGLRLLCGSQVPVEVMGFPKFADCWENFVDHEKPLSFNPYKMLEELDKNSRAIKRRLERIKIPGVRAQGRYMDILCDAEV

SEQ ID NO: 285 - protein, 386 aa, Homo sapiens
MNPQIRNPMERMYRDTFYDNFENEPILYGRSYTWLCYEVKIKRGRSNLLWDTGVFRGPVLPKRQSNHRQEVYFRFENHAEMCFLSWFCGNRLPANRRFQITWFVSWNPCLPCVVKVTKFLAEHPNVTLTISAARLYYYRDRDWRWVLLRLHKAGARVKIMDYEDFAYCWENFVCNEGQPFMPWYKFDDNYASLHRTLKEILRNPMEAMYPHIFYFHFKNLLKACGRNESWLCFTMEVTKHHSAVFRKRGVFRNQVDPETHCHAERCFLSWFCDDILSPNTNYEVTWYTSWSPCPECAGEVAEFLARHSNVNLTIFTARLCYFWDTDYQEGLCSLSQEGASVKIMGYKDFVSCWKNFVYSDDEPFKPWKGLQTNFRLLKRRLREILQ

SEQ ID NO: 286 - protein, 236 aa, Homo sapiens
MTSEKGPSTGDPTLRRRIEPWEFDVFYDPRELRKEACLLYEIKWGMSRKIWRSSGKNTTNHVEVNFIKKFTSERDFHPSMSCSITWFLSWSPCWECSQAIREFLSRHPGVTLVIYVARLFWHMDQQNRQGLRDLVNSGVTIQIMRASEYYHCWRNFVNYPPGDEAHWPQYPPLWMMLYALELHCIILSLPPCLKISRRWQNHLTFFRLHLQNCHYQTIPPHILLATGLIHPSVAWR

SEQ ID NO: 287 - protein, 229 aa, Mus musculus
MSSETGPVAVDPTLRRRIEPHEFEVFFDPRELRKETCLLYEINWGGRHSVWRHTSQNTSNHVEVNFLEKFTTERYFRPNTRCSITWFLSWSPCGECSRAITEFLSRHPYVTLFIYIARLYHHTDQRNRQGLRDLISSGVTIQIMTEQEYCYCWRNFVNYPPSNEAYWPRYPHLWVKLYVLELYCIILGLPPCLKILRRKQPQLTFFTITLQTCHYQRIPPHLLWATGLK

SEQ ID NO: 288 - protein, 229 aa, Rattus rattus [sequence omitted]

SEQ ID NO: 289 - protein, 36 aa, Artificial Sequence
  Synthetic Polypeptide
  misc_feature (2)..(2): Xaa can be any naturally occurring amino acid
  misc_feature (4)..(29): Xaa can be any naturally occurring amino acid
  misc_feature (32)..(35): Xaa can be any naturally occurring amino acid
HXEXXXXXXXXXXXXXXXXXXXXXXXXXXPCXXXXC

SEQ ID NO: 290 - protein, 84 aa, Artificial Sequence
  Synthetic Polypeptide
MTNLSDIIEKETGKQLVIQESILMLPEEVEEVIGNKPESDILVHTAYDESTDENVMLLTSDAPEYKPWALVIQDSNGENKIKML

SEQ ID NO: 291 - protein, 772 aa, Artificial Sequence
  Synthetic Polypeptide
MGSSHHHHHHMSSETGPVAVDPTLRRRIEPHEFEVEFDPRELRKETCLLYEINWGGRHSIWRHTSQNTNKHVEVNFIEKFTTERYFCPNTRCSITWFLSWSPCGECSRAITEFLSRYPHVTLFIYIARLYHHADPRNRQGLVKVMGRHKPENIVIEMARENQTTQKGQKNSRERMKRIEEGIKELGSQILKEHPVENTQLQNEKLYLYYLQNGRDMYVDQELDINRLSDYDVDAIVPQSFLKDDSIDNKVLTRSDKNRGKSDNVPSEEVVKKMKNYWRQLLNAKLITQRKFDNLTKAERGGLSELDKAGFIKRQLVETRQITKHVAQILDSRMNTKYDENDKLIREVKVITLKSKLVSDFRKDFQFYKVREINNYHHAHDAYLNAVVGTALIKKYPKLESEFVYGDYKVYDVRKMIAKSEQEIGKATAKYFFYSNIMNFFKTEILANGEIRKRPLIETNGETGEIVWDKGRDFATVRKVLSMPQVNIVKKTEVQTGGFSKESILPKRNSDKLIARKKDWDPKKYGGFDSPTVAYSVLVVAKVEKGKSKKLKSVKELLGITIMERSSFEKNPIDFLEAKGYKEVKKDLIIKLPKYSLFELENGRKRMLASAGELQKGNELALPSKYVNFLYLASHYEKLKGSPEDNEQKQLFVEQHKHYLDEIIEQISEFSKRVILADANLDKVLSAYNKHRDKPIREQAENIIHLFTLTNLGAPAAFKYFDTTIDRKRYTSTKEVLDATLIHQSITGLYETRIDLSQLGGDSGGSPKKKRKV

SEQ ID NO: 292 - protein, 1622 aa, Artificial Sequence
  Synthetic Polypeptide
MSSETGPVAVDPTLRRRIEPHEFEVFFDPRELRKETCLLYEINWGGRHSIWRHTSQNTNKHVEVNFIEKFTTERYFCPNTRCSITWFLSWSPCGECSRAITEFLSRYPHVTLFIYIARLYHHADPRNRQGLRDLISSGVTIQIMTEQESGYCWRNFVNYSPSNEAHWPRYPHLWVRLYVLELYCIILGLPPCLNILRRKQPQLTFFTIALQSCHYQRLPPHILWATGLKSGSETPGTSESATPESDKKYSIGLAIGTNSVGWAVITDEYKVPSKKFKVLGNTDRHSIKKNLIGALLFDSGETAEATRLKRTARRRYTRRKNRICYLQEIFSNEMAKVDDSFFHRLEESFLVEEDKKHERHPIFGNIVDEVAYHEKYPTIYHLRKKLVDSTDKADLRLIYLALAHMIKFRGHFLIEGDLNPDNSDVDKLFIQLVQTYNQLFEENPINASGVDAKAILSARLSKSRRLENLIAQLPGEKKNGLFGNLIALSLGLTPNFKSNFDLAEDAKLQLSKDTYDDDLDNLLAQIGDQYADLFLAAKNLSDAILLSDILRVNTEITKAPLSASMIKRYDEHHQDLTLLKALVRQQLPEKYKEIFFDQSKNGYAGYIDGGASQEEFYKFIKPILEKMDGTEELLVKLNREDLLRKQRTFDNGSIPHQIHLGELHAILRRQEDFYPFLKDNREKIEKILTFRIPYYVGPLARGNSRFAWMFRKSEETITPWNFEEVVDKGASAQSFIERMTNFDKNLPNEKVLPKHSLLYEYFTVYNELTKVKYVTEGMRKPAFLSGEQKKAIVDLLFKTNRKVTVKQLKEDYFKKIECFDSVEISGVEDRFNASLGTYHDLLKIIKDKDFLDNEENEDILEDIVLTLTLFEDREMIEERLKTYAHLFDDKVMKQLKRRRYTGWGRLSKLINGIRDKQSGKTILDFLKSDGFANRNFMQLIHDDSLTFKEDIQKAQVSGQGDSLHEHIANLAGSPAIKKGILQTVKVVDELVKVMGRHKPENIVIEMARENQTTQKGQKNSRERMKRIEEGIKELGSQILKEHPVENTQLQNEKLYLYYLQNGRDMYVDQELDINRLSDYDVDAIVPQSFLKDDSIDNKVLTRSDKNRGKSDNVPSEEVVKKMKNYWRQLLNAKLITQRKFDNLTKAERGGLSELDKAGFIKRQLVETRQITKHVAQILDSRMNTKYDENDKLIREVKVITLKSKLVSDFRKDFQFYKVREINNYHHAHDAYLNAVVGTALIKKYPKLESEFVYGDYKVYDVRKMIAKSEQEIGKATAKYFFYSNIMNFFKTEITLANGEIRKRPLIETNGETGEIVWDKGRDFATVRKVLSMPQVNIVKKTEVQTGGFSKESILPKRNSDKLIARKKDWDPKKYGGFDSPTVAYSVLVVAKVEKGKSKKLKSVKELLGITIMERSSFEKNPIDFLEAKGYKEVKKDLIIKLPKYSLFELENGRKRMLASAGELQKGNELALPSKYVNFLYLASHYEKLKGSPEDNEQKQLFVEQHKHYLDEIIEQISEFSKRVILADANLDKVLSAYNKHRDKPIREQAENIIHLFTLTNLGAPAAFKYFDTTIDRKRYTSTKEVLDATLIHQSITGLYETRIDLSQLGGDSGGSPKKKRKV

SEQ ID NO: 293 - protein, 1630 aa, Artificial Sequence
  Synthetic Polypeptide
MTSEKGPSTGDPTLRRRIEPWEFDVFYDPRELRKEACLLYEIKWGMSRKIWRSSGKNTTNHVEVNFIKKFTSERDFHPSMSCSITWFLSWSPCWECSQAIREFLSRHPGVTLVIYVARLFWHMDQQNRQGLRDLVNSGVTIQIMRASEYYHCWRNFVNYPPGDEAHWPQYPPLWMMLYALELHCIILSLPPCLKISRRWQNHLTFFRLHLQNCHYQTIPPHILLATGLIHPSVAWRSGSETPGTSESATPESDKKYSIGLAIGTNSVGWAVITDEYKVPSKKFKVLGNTDRHSIKKNLIGALLFDSGETAEATRLKRTARRRYTRRKNRICYLQEIFSNEMAKVDDSFFHRLEESFLVEEDKKHERHPIFGNIVDEVAYHEKYPTIYHLRKKLVDSTDKADLRLIYLALAHMIKFRGHFLIEGDLNPDNSDVDKLFIQLVQTYNQLFEENPINASGVDAKAILSARLSKSRRLENLIAQLPGEKKNGLFGNLIALSLGLTPNFKSNFDLAEDAKLQLSKDTYDDDLDNLLAQIGDQYADLFLAAKNLSDAILLSDILRVNTEITKAPLSASMIKRYDEHHQDLTLLKALVRQQLPEKYKEIFFDQSKNGYAGYIDGGASQEEFYKFIKPILEKMDGTEELLVKLNREDLLRKQRTFDNGSIPHQIHLGELHAILRRQEDFYPFLKDNREKIEKILTFRIPYYVGPLARGNSRFAWMTRKSEETITPWNFEEVVDKGASAQSFIERMTNFDKNLPNEKVLPKHSLLYEYFTVYNELTKVKYVTEGMRKPAFLSGEQKKAIVDLLFKTNRKVTVKQLKEDYFKKIECFDSVEISGVEDRFNASLGTYHDLLKIIKDKDFLDNEENEDILEDIVLTLTLFEDREMIEERLKTYAHLFDDKVMKQLKRRRYTGWGRLSRKLINGIRDKQSGKTILDFLKSDGFANRNFMQLIHDDSLTFKEDIQKAQVSGQGDSLHEHIANLAGSPAIKKGILQTVKVVDELVKVMGRHKPENIVIEMARENQTTQKGQKNSRERMKRIEEGIKELGSQILKEHPVENTQLQNEKLYLYYLQNGRDMYVDQELDINRLSDYDVDAIVPQSFLKDDSIDNKVLTRSDKNRGKSDNVPSEEVVKKMKNYWRQLLNAKLITQRKFDNLTKAERGGLSELDKAGFIKRQLVETRQITKHVAQILDSRMNTKYDENDKLIREVKVITLKSKLVSDFRKDFQFYKVREINNYHHAHDAYLNAVVGTALIKKYPKLESEFVYGDYKVYDVRKMIAKSEQEIGKATAKYFFYSNIMNFFKTEITLANGEIRKRPLIETNGETGEIVWDKGRDFATVRKVLSMPQVNIVKKTEVQTGGFSKESILPKRNSDKLIARKKDWDPKKYGGFDSPTVAYSVLVVAKVEKGKSKKLKSVKELLGITIMERSSFEKNPIDFLEAKGYKEVKKDLIIKLPKYSLFELENGRKRMLASAGELQKGNELALPSKYVNFLYLASHYEKLKGSPEDNEQKQLFVEQHKHYLDEIIEQISEFSKRVILADANLDKVLSAYNKHRDKPIREQAENIIHLFTLTNLGAPAAFKYFDTTIDRKRYTSTKEVLDATLIHQSITGLYETRIDLSQLGGDSGGSPKKKRKV

SEQ ID NO: 294 - protein, 1709 aa, Artificial Sequence
  Synthetic Polypeptide
MSSETGPVAVDPTLRRRIEPHEFEVFFDPRELRKETCLLYEINWGGRHSIWRHTSQNTNKHVEVNFIEKFTTERYFCPNTRCSITWFLSWSPCGECSRAITEFLSRYPHVTLFIYIARLYHHADPRNRQGLRDLISSGVTIQIMTEQESGYCWRNFVNYSPSNEAHWPRYPHLWVRLYVLELYCIILGLPPCLNILRRKQPQLTFFTIALQSCHYQRLPPHILWATGLKSGSETPGTSESATPESDKKYSIGLAIGTNSVGWAVITDEYKVPSKKFKVLGNTDRHSIKKNLIGALLFDSGETAEATRLKRTARRRYTRRKNRICYLQEIFSNEMAKVDDSFFHRLEESFLVEEDKKHERHPIFGNIVDEVAYHEKYPTIYHLRKKLVDSTDKADLRLIYLALAHMIKFRGHFLIEGDLNPDNSDVDKLFIQLVQTYNQLFEENPINASGVDAKAILSARLSKSRRLENLIAQLPGEKKNGLFGNLIALSLGLTPNFKSNFDLAEDAKLQLSKDTYDDDLDNLLAQIGDQYADLFLAAKNLSDAILLSDILRVNTEITKAPLSASMIKRYDEHHQDLTLLKALVRQQLPEKYEILFFDQSKNGYAGYIDGGASQEEFYKFIKPILEKMDGTEELLVKLNREDLLRKQRTFDNGSIPHQIHLGELHAILRRQEDFYPFLKDNREKIEKILTFRIPYYVGPLARGNSRFAWMTRKSEETITPWNFEEVVDKGASAQSFIERMTNFDKNLPNEKVLPKHSLLYEYFTVYNELYKVKYVTEGMRKPAFLSGEQKKAIVDLLFKTNRKVTVKQLKEDYFKKIECFDSVEISGVEDRFNASLGTYHDLLKIIKDKDFLDNEENEDILEDIVLTLTLFEDREMIEERLKTYAHLFDDKVMKQLKRRRYTGWGRLSRKLINGIRDKQSGKTILDFLKSDGFANRNFMQLIHDDSLTFKEDIQKAQVSGQGDSLHEHIANLAGSPAIKKGILQTVKVVDELVKVMGRHKPENIVIEMARENQTTQKGQKNSRERMKRIEEGIKELGSQILKEHPVENTQLQNEKLYLYYLQNGRDMYVDQELDINRLSDYDVDAIVPQSFLKDDSIDNKVLTRSDKNRGKSDNVPSEEVVKKMKNYWRQLLNAKLITQRKFDNLTKAERGGLSELDKAGFIKRQLVETRQITKHVAQILDSRMNTKYDENDKLIREVKVITLKSKLVSDFRKDFQFYKVREINNYHHAHDAYLNAVVGYALIKKYPKLESEFVYGDYKVYDVRKMIAKSEQEIGKATAKYFFYSNIMNFFKTEITLANGEIRKRPLIETNGETGEIVWDKGRDFATVRKVLSMPQVNIVKKTEVQTGGFSKESILPKRNSDKLIARKKDWDPKKYGGFDSPTVAYSVLVVAKVEKGKSKKLKSVKELLGITIMERSSFEKNPIDFLEAKGYKEVKKDLIIKLPKYSLFELENGRKRMLASAGELQKGNELALPSKYVNFLYLASHYEKLKGSPEDNEQKQLFVEQHKHYLDEIIEQISEFSKRVILADANLDKVLSAYNKHRDKPIREQAENIIHLFTLTNLGAPAAFKYFDTTIDRKRYTSTKEVLDATLIHQSITGLYETRIDLSQLGGDSGGSTNLSDIIEKETGKQLVIQESILMLPEEVEEVIGNKPESDILVHTAYDESTDENVMLLSDAPEYKPWALVIQDSNGENKIKMLSGGSPKKKRKV

SEQ ID NO: 295 - protein, 1708 aa, Artificial Sequence
  Synthetic Polypeptide
MSSETGPVAVDPTLRRRIEPHEFEVFFDPRELRKETCLLYEINWGGRHSIWRHTSQNTNKHVEVNFIEKFTTERYFCPNTRCSITWFLSWSPCGECSRAITEFLSRYPHVTLFIYIARLYHHADPRNRQGLRDLISSGVTIQIMTEQESGYCWRNFVNYSPSNEAHWPRYPHLWVRLYVLELYCIILGLPPCLNILRRKQPQLTFFTIALQSCHYQRLPPHILWATGLKSGSETPGTSESATPESDKKYSIGLAIGTNSVGWAVITDEYKVPSKKFKVLGNTDRHSIKKNLIGALFDSGETAEATRLKRTARRRYTRRKNRICYLQEIFSNEMAKVDDSFFHRLEESFLVEEDKKHERHPIFGNIVDEVAYHEKYPTIYHLRKKLVDSTDKADLRLIYLALAHMIKFRGHFLIEGDLNPDNSDVDKLFIQLVQTYNQLFEENPINASGVDAKAILSARLSKSRRLENLIAQLPGEKKNGLFGNLIALSLGLTPNFKSNFDLAEDAKLQLSKDTYDDDLDNLLAQIGDQYADLFLAAKNLSDAILLSDILRVNTEITKAPLSASMIKRYDEHHQDLTLLKALVRQQLPEKYKEIFFDQSKNGYAGYIDGGASQEEFYKFIKPILEKMDGTEELLVKLNREDLLRKQRTFDNGSIPHQIHLGELHAILRRQEDFYPFLKDNREDIEKILTFRIPYYVGPLARGNSRFAWMTRKSEETITPWNFEEVVDKGASAQSFIERMTNDKNLPNEKVLPKHSLLYEYFTVYNELTKVKYVTEGMRKPAFLSSGEQKKAIVDLLFKTNRKVTVKQLKEDYFKKIECFDSVEISGVEDRFNASLGTYGDLLKIIKDIDFLDNEENEDILEDIVLTLTLFEDREMIEERLKTYAHLFDDKVMKQLKRRRYTGWGRLSRKLINGIRDKQSGKTILDFLKSDGFANRNFMQLIHDDSLTFKEDIQKAQVSGQGDSLHEHIANLAGSPAIKKGILQTVKVVDELVKVMGRHKPENIVIEMARENQTTQKGQKNSRERMKRIEEGIKELGSQILKEHPVENTQLQNEKLYLYYLQNGRDMYVDQELDINRLSDYDVDHIVPQSFLKDDSIDNKVLTRSDKNRGKSDNVPSEEVVKKMKNYWRQLLNAKLITQRKFDLTKAERGGLSELDKAGFIKRQLVETRQITKHVAQILDSRMNTKYDENDKLIREVKVITLKSKLVSDFRKDFQFYKVREINNYHHAHDAYLNAVVGTALIKKYPKLESEFVYGDYKVYDVRKMIAKSEQEIGKATAKYFFYSNIMNFFKTEITLANGEIRKRPLIETNGETGEIVWDKGRDFATVRKVLSMPQVNIVKKTEVQTGGFSKESILPKRNSDKLIARKKDWDPKKYGGFDSPTVAYSVLVVAKVEKGKSKKLKSVKELLGITIMERSSFEKNPIDFLEAKGYKEVKKDLIIKLPKYSLFELENGRKRMLASAGELQKGNELALPSKYVNFLYLASHYEKLKGSPEDNEQKQLFVEQHKHYLDEIIEQISEFSKRVILADANLDKVLSAYNKHRDKPIREQAENIIHLFTLTNLGAPAAFKYFDTTIDRKRYTSTKEVLDATLIHQSITGLYETRIDLSQLGGDSGGSTNLSDIIEKETGKQLVIQESILMLPEEVEEVIGNKPESDILVHTAYDESTDENVMLLTSDAPEYKPWALVIQDSNGENKIKMLSGGSPKKKRKV

SEQ ID NO: 296 - protein, 7 aa, Artificial Sequence
  Synthetic Polypeptide
PKKKRKV

SEQ ID NO: 297 - protein, 30 aa, Artificial Sequence
  Synthetic Polypeptide
MDSLLMNRRKFLYQFKNVRWAKGRRETYLC

SEQ ID NO: 298 - skipped

SEQ ID NO: 299 - DNA, 921 bp, Artificial Sequence
  Synthetic Polynucleotide
atggacgaatttgaaatgataaagagaaacacatctgaaattatcagcgaggaagagttaagagaggttttaaaaaaagatgaaaaatctgctcagataggttttgaaccaagtggtaaaatacatttagggcattatctccaaataaaaaagatgattgatttacaaaatgctggatttgatataattatattgttggctgatttacacgcctatttaaaccagaaaggagagttggatgagattagaaaaataggagattataacaaaaaagtttttgaagcaatggggttaaaggcaaaatatgtttatggaagtactttccagcttgataaggattatacactgaatgtctatagattggctttaaaaactaccttaaaaagagcaagaaggagtatggaacttatagcaagagaggatgaaaatccaaaggttgctgaagttatctatccaataatgcaggttaatgcaattcattatcctggcgttgatgttgcagttggagggatggagcagagaaaaatacacatgttagcaagggagcttttaccaaaaaaggttgtttgtattcacaaccctgtcttaacgggtttggatggagaagggaagatgagttcttcaaaagggaattttatagctgttgatgactctccagaagagattagggctaagataaagaaagcatactgcccagctggagttgttgaaggaaatccaataatggagatagctaaatacttccttgaatatcctttaaccataaaaaggccagaaaaatttggtggagatttgacagttagtagctatgaggagttagagagtttatttaaaaataaggaattgcatccaatggatttaaaaaatgctgtagctgaagaacttataaagattttagagccaattagaaagagattataa

SEQ ID NO: 300 - DNA, 917 bp, Artificial Sequence
  Synthetic Polynucleotide
atggacgaatttgaaatgataaagagaaacacatctgaaattatcagcgaggaagagttaagagaggttttaaaaaaagatgaaaaatctgctgggataggttttgaaccaagtggtaaaatacatttagggcattatctccaaataaaaaagatgattgatttacaaaatgctggatttgatataattatattgttggctgatttacacgcctatttaaaccagaaaggagagttggatgagattagaaaaataggagattataacaaaaaagtttttgaagcaatggggttaaaggcaaaatgtgcttatggaagtcctttccagcttgataaggattatacactgaatgtctatagattggctttaaaaactaccttaaaaagagcaagaaggagtatggaacttatagaagagaggatgaaaatccaaaggttgctgaagttatctatccaataatgcaggttaatggttatcattatcttggcgttgatgttgcagttggagggatggagcagagaaaaatacacatgttagcaagggagcttttaccaaaaaaggttgtttgtattcacaaccctgtcttaacgggtttggatggagaaggaaagatgagttcttcaaaagggaattttatagctgttgatgactctccagaagagattagggctaagataaagaaagcatactgcccagctggagttgttgaaggaaatccaataatggagatagctaaatacttccttgaatatcctttaaccataaaaaggccagaaaaatttggtggagatttgacagttaatagctatgaggagttagagagtttatttaaaaataaggaattgcatccaatggatttaaaaaatgctgtagctgaagaacttataaagattttagagccaattagaaagagatta

SEQ ID NO: 301 - DNA, 917 bp, Artificial Sequence
  Synthetic Polynucleotide
atggacgaatttgaaatgataaagagaaacacatctgaaattatcagcgaggaagagttaagagaggttttaaaaaaagatgaaaaatctgctcagataggttttgaaccaagtggtaaaatacatttagggcattatctccaaataaaaaagatgattgatttacaaaatgctggatttgatataattatattgttggctgatttacacgcctatttaaaccagaaaggagagttggatgagattagaaaaataggagattataacaaaaaagtttttgaagcaatggggttaaaggcaaaatatgtttatggaagtcctttccagcttgataaggattatacactgaatgtctatagattggctttaaaaactaccttaaaaagagcaagaaggagtatggaacttatagaagagaggatgaaaatccaaaggttgctgaagttatctatccaataatgcaggttaattgttctcattattatggcgttgatgttgcagttggagggatggagcagagaaaaatacacatgttagcaagggagcttttaccaaaaaaggttgtttgtattcacaaccctgtcttaacgggtttggatggagaaggaaagatgagttcttcaaaagggaattttatagctgttgatgactctccagaagagattagggctaagataaagaaagcatactgcccagctggagttgttgaaggaaatccaataatggagatagctaaatacttccttgaatatcctttaaccataaaaaggccagaaaaatttggtggagatttgacagttaatagctatgaggagttagagagtttatttaaaaataaggaattgcatccaatggatttaaaaaatgctgtagctgaagaacttataaagattttagagccaattagaaagagatta

SEQ ID NO: 302 - DNA, 917 bp, Artificial Sequence
  Synthetic Polynucleotide
atggacgaatttgaaatgataaagagaaacacatctgaaattatcagcgaggaagagttaagagaggttttaaaaaaagatgaaaaatctgctactataggttttgaaccaagtggtaaaatacatttagggcattatctccaaataaaaaagatgattgatttacaaaatgctggatttgatataattatattgttggctgatttacacgcctatttaaaccagaaaggagagttggatgagattagaaaaataggagattataacaaaaaagtttttgaagcaatggggttaaaggcaaaatatgtttatggaagtacgttccagcttgataaggattatacactgaatgtctatagattggctttaaaaactaccttaaaaagagcaagaaggagtatggaacttatagaagagaggatgaaaatccaaaggttgctgaagttatctatccaataatgcaggttaatccgttgcattatgctggcgttgatgttgcagttggagggatggagcagagaaaaatacacatgttagcaagggagcttttaccaaaaaaggttgtttgtattcacaaccctgtcttaacgggtttggatggagaaggaaagatgagttcttcaaaagggaattttatagctgttgatgactctccagaagagattagggctaagataaagaaagcatactgcccagctggagttgttgaaggaaatccaataatggagatagctaaatacttccttgaatatcctttaaccataaaaaggccagaaaaatttggtggagatttgacagttaatagctatgaggagttagagagtttatttaaaaataaggaattgcatccaatggatttaaaaaatgctgtagctgaagaacttataaagattttagagccaattagaaagagatta

SEQ ID NO: 303 - DNA, 917 bp, Artificial Sequence
  Synthetic Polynucleotide
atggacgaatttgaaatgataaagagaaacacatctgaaattatcagcgaggaagagttaagagaggttttaaaaaaagatgaaaaatctgctcatataggttttgaaccaagtggtaaaatacatttagggcattatctccaaataaaaaagatgattgatttacaaaatgctggatttgatataattatattgttggctgatttacacgcctatttaaaccagaaaggagagttggatgagattagaaaaataggagattataacaaaaaagtttttgaagcaatggggttaaaggcaaaatatgtttatggaagtgagttccagcttgataaggattatacactgaatgtctatagattggctttaaaaactaccttaaaaagagcaagaaggagtatggaacttatagaagagaggatgaaaatccaaaggttgctgaagttatctatccaataatgcaggttaatcggccgcattatcctggcgttgatgttgcagttggagggatggagcagagaaaaatacacatgttagcaagggagcttttaccaaaaaaggttgtttgtattcacaaccctgtcttaacgggtttggatggagaaggaaagatgagttcttcaaaagggaattttatagctgttgatgactctccagaagagattagggctaagataaagaaagcatactgcccagctggagttgttgaaggaaatccaataatggagatagctaaatacttccttgaatatcctttaaccataaaaaggccagaaaaatttggtggagatttgacagttaatagctatgaggagttagagagtttatttaaaaataaggaattgcatccaatggatttaaaaaatgctgtagctgaagaacttataaagattttagagccaattagaaagagatta

SEQ ID NO: 304 - DNA, 917 bp, Artificial Sequence
  Synthetic Polynucleotide
atggacgaatttgaaatgataaagagaaacacatctgaaattatcagcgaggaagagttaagagaggttttaaaaaaagatgaaaaatctgcttatataggttttgaaccaagtggtaaaatacatttagggcattatctccaaataaaaaagatgattgatttacaaaatgctggatttgatataattatattgttggctgatttacacgcctatttaaaccagaaaggagagttggatgagattagaaaaataggagattataacaaaaaagtttttgaagcaatggggttaaaggcaaaatatgtttatggaagtcctttccagcttgataaggattatacactgaatgtctatagattggctttaaaaactaccttaaaaagagcaagaaggagtatggaacttatagaagagaggatgaaaatccaaaggttgctgaagttatctatccaataatgcaggttaatcagagtcattatgatggcgttgatgttgcagttggagggatggagcagagaaaaatacacatgttagcaagggagcttttaccaaaaaaggttgtttgtattcacaaccctgtcttaacgggtttggatggagaaggaaagatgagttcttcaaaagggaattttatagctgttgatgactctccagaagagattagggctaagataaagaaagcatactgcccagctggagttgttgaaggaaatccaataatggagatagctaaatacttccttgaatatcctttaaccataaaaaggccagaaaaatttggtggagatttgacagttaatagctatgaggagttagagagtttatttaaaaataaggaattgcatccaatggatttaaaaaatgctgtagctgaagaacttataaagattttagagccaattagaaagagatta

SEQ ID NO: 305 - DNA, 917 bp, Artificial Sequence
  Synthetic Polynucleotide
atggacgaatttgaaatgataaagagaaacacatctgaaattatcagcgaggaagagttaagagaggttttaaaaaaagatgaaaaatctgcttcgataggttttgaaccaagtggtaaaatacatttagggcattatctccaaataaaaaagatgattgatttacaaaatgctggatttgatataattatattgttggctgatttacacgcctatttaaaccagaaaggagagttggatgagattagaaaaataggagattataacaaaaaagtttttgaagcaatggggttaaaggcaaaatatgtttatggaagtacgttccagcttgataaggattatacactgaatgtctatagattggctttaaaaactaccttaaaaagagcaagaaggagtatggaacttatagaagagaggatgaaaatccaaaggttgctgaagttatctatccaataatgcaggttaatacgtatcattatgctggcgttgatgttgcagttggagggatggagcagagaaaaatacacatgttagcaagggagcttttaccaaaaaaggttgtttgtattcacaaccctgtcttaacgggtttggatggagaaggaaagatgagttcttcaaaagggaattttatagctgttgatgactctccagaagagattagggctaagataaagaaagcatactgcccagctggagttgttgaaggaaatccaataatggagatagctaaatacttccttgaatatcctttaaccataaaaaggccagaaaaatttggtggagatttgacagttaatagctatgaggagttagagagtttatttaaaaataaggaattgcatccaatggatttaaaaaatgctgtagctgaagaacttataaagattttagagccaattagaaagagatta

SEQ ID NO: 306 - DNA, 917 bp, Artificial Sequence
  Synthetic Polynucleotide
atggacgaatttgaaatgataaagagaaacacatctgaaattatcagcgaggaagagttaagagaggttttaaaaaaagatgaaaaatctgctcctataggttttgaaccaagtggtaaaatacatttagggcattatctccaaataaaaaagatgattgatttacaaaatgctggatttgatataattatattgttggctgatttacacgcctatttaaaccagaaaggagagttggatgagattagaaaaataggagattataacaaaaaagtttttgaagcaatggggttaaaggcaaaatatgtttatggaagtatgttccagcttgataaggattatacactgaatgtctatagattggctttaaaaactaccttaaaaagagcaagaaggagtatggaacttatagaagagaggatgaaaatccaaaggttgctgaagttatctatccaataatgcaggttaataatacgcattatgggggcgttgatgttgcagttggagggatggagcagagaaaaatacacatgttagcaagggagcttttaccaaaaaaggttgtttgtattcacaaccctgtcttaacgggtttggatggagaaggaaagatgagttcttcaaaagggaattttatagctgttgatgactctccagaagagattagggctaagataaagaaagcatactgcccagctggagttgttgaaggaaatccaataatggagatagctaaatacttccttgaatatcctttaaccataaaaaggccagaaaaatttggtggagatttgacagttaatagctatgaggagttagagagtttatttaaaaataaggaattgcatccaatggatttaaaaaatgctgtagctgaagaacttataaagattttagagccaattagaaagagatta

SEQ ID NO: 307 - DNA, 917 bp, Artificial Sequence
  Synthetic Polynucleotide
atggacgaatttgaaatgataaagagaaacacatctgaaattatcagcgaggaagagttaagagaggttttaaaaaaagatgaaaaatctgctacgataggttttgaaccaagtggtaaaatacatttagggcattatctccaaataaaaaagatgattgatttacaaaatgctggatttgatataattatattgttggctgatttacacgcctatttaaaccagaaaggagagttggatgagattagaaaaataggagattataacaaaaaagtttttgaagcaatggggttaaaggcaaaatatgtttatggaagtcatttccagcttgataaggattatacactgaatgtctatagattggctttaaaaactaccttaaaaagagcaagaaggagtatggaacttatagaagagaggatgaaaatccaaaggttgctgaagttatctatccaataatgcaggttaatcagactcattatgagggcgttgatgttgcagttggagggatggagcagagaaaaatacacatgttagcaagggagcttttaccaaaaaaggttgtttgtattcacaaccctgtcttaacgggtttggatggagaaggaaagatgagttcttcaaaagggaattttatagctgttgatgactctccagaagagattagggctaagataaagaaagcatactgcccagctggagttgttgaaggaaatccaataatggagatagctaaatacttccttgaatatcctttaaccataaaaaggccagaaaaatttggtggagatttgacagttaatagctatgaggagttagagagtttatttaaaaataaggaattgcatccaatggatttaaaaaatgctgtagctgaagaacttataaagattttagagccaattagaaagagatta

SEQ ID NO: 308 - DNA, 917 bp, Artificial Sequence
  Synthetic Polynucleotide
atggacgaatttgaaatgataaagagaaacacatctgaaattatcagcgaggaagagttaagagaggttttaaaaaaagatgaaaaatctgctcatataggttttgaaccaagtggtaaaatacatttagggcattatctccaaataaaaaagatgattgatttacaaaatgctggatttgatataattatattgttggctgatttacacgcctatttaaaccagaaaggagagttggatgagattagaaaaataggagattataacaaaaaagtttttgaagcaatggggttaaaggcaaaatatgtttatggaagtaagttccagcttgataaggattatacactgaatgtctatagattggctttaaaaactaccttaaaaagagcaagaaggagtatggaacttatagaagagaggatgaaaatccaaaggttgctgaagttatctatccaataatgcaggttaatccgtgtcattatcatggcgttgatgttgcagttggagggatggagcagagaaaaatacacatgttagcaagggagcttttaccaaaaaaggttgtttgtattcacaaccctgtcttaacgggtttggatggagaaggaaagatgagttcttcaaaagggaattttatagctgttgatgactctccagaagagattagggctaagataaagaaagcatactgcccagctggagttgttgaaggaaatccaataatggagatagctaaatacttccttgaatatcctttaaccataaaaaggccagaaaaatttggtggagatttgacagttaatagctatgaggagttagagagtttatttaaaaataaggaattgcatccaatggatttaaaaaatgctgtagctgaagaacttataaagattttagagccaattagaaagagatta

SEQ ID NO: 309 - DNA, 917 bp, Artificial Sequence
  Synthetic Polynucleotide
atggacgaatttgaaatgataaagagaaacacatctgaaattatcagcgaggaagagttaagagaggttttaaaaaaagatgaaaaatctgctgctataggttttgaaccaagtggtaaaatacatttagggcattatctccaaataaaaaagatgattgatttacaaaatgctggatttgatataattatattgttggctgatttacacgcctatttaaaccagaaaggagagttggatgagattagaaaaataggagattataacaaaaaagtttttgaagcaatggggttaaaggcaaaatatgtttatggaagtcggttccagcttgataaggattatacactgaatgtctatagattggctttaaaaactaccttaaaaagagcaagaaggagtatggaacttatagaagagaggatgaaaatccaaaggttgctgaagttatctatccaataatgcaggttaatgtgattcattatgatggcgttgatgttgcagttggagggatggagcagagaaaaatacacatgttagcaagggagcttttaccaaaaaaggttgtttgtattcacaaccctgtcttaacgggtttggatggagaaggaaagatgagttcttcaaaagggaattttatagctgttgatgactctccagaagagattagggctaagataaagaaagcatactgcccagctggagttgttgaaggaaatccaataatggagatagctaaatacttccttgaatatcctttaaccataaaaaggccagaaaaatttggtggagatttgacagttaatagctatgaggagttagagagtttatttaaaaataaggaattgcatccaatggatttaaaaaatgctgtagctgaagaacttataaagattttagagccaattagaaagagatta

SEQ ID NO: 310 - DNA, 917 bp, Artificial Sequence
  Synthetic Polynucleotide
atggacgaatttgaaatgataaagagaaacacatctgaaattatcagcgaggaagagttaagagaggttttaaaaaaagatgaaaaatctgctgggataggttttgaaccaagtggtaaaatacatttagggcattatctccaaataaaaaagatgattgatttacaaaatgctggatttgatataattatattgttggctgatttacacgcctatttaaaccagaaaggagagttggatgagattagaaaaataggagattataacaaaaaagtttttgaagcaatggggttaaaggcaaaatatgtttatggaagtactttccagcttgataaggattatacactgaatgtctatagattggctttaaaaactaccttaaaaagagcaagaaggagtatggaacttatagaagagaggatgaaaatccaaaggttgctgaagttatctatccaataatgcaggttaatacgtattattatgctggcgttgatgttgcagttggagggatggagcagagaaaaatacacatgttagcaagggagcttttaccaaaaaaggttgtttgtattcacaaccctgtcttaacgggtttggatggagaaggaaagatgagttcttcaaaagggaattttatagctgttgatgactctccagaagagattagggctaagataaagaaagcatactgcccagctggagttgttgaaggaaatccaataatggagatagctaaatacttccttgaatatcctttaaccataaaaaggccagaaaaatttggtggagatttgacagttaatagctatgaggagttagagagtttatttaaaaataaggaattgcatccaatggatttaaaaaatgctgtagctgaagaacttataaagattttagagccaattagaaagagatta

SEQ ID NO: 311 - DNA, 917 bp, Artificial Sequence
  Synthetic Polynucleotide
atggacgaatttgaaatgataaagagaaacacatctgaaattatcagcgaggaagagttaagagaggttttaaaaaaagatgaaaaatctgctctgataggttttgaaccaagtggtaaaatacatttagggcattatctccaaataaaaaagatgattgatttacaaaatgctggatttgatataattatattgttggctgatttacacgcctatttaaaccagaaaggagagttggatgagattagaaaaataggagattataacaaaaaagtttttgaagcaatggggttaaaggcaaaatatgtttatggaagtccgttccagcttgataaggattatacactgaatgtctatagattggctttaaaaactaccttaaaaagagcaagaaggagtatggaacttatagaagagaggatgaaaatccaaaggttgctgaagttatctatccaataatgcaggttaatcagattcattctagtggcgttgatgttgcagttggagggatggagcagagaaaaatacacatgttagcaagggagcttttaccaaaaaaggttgtttgtattcacaaccctgtcttaacgggtttggatggagaaggaaagatgagttcttcaaaagggaattttatagctgttgatgactctccagaagagattagggctaagataaagaaagcatactgcccagctggagttgttgaaggaaatccaataatggagatagctaaatacttccttgaatatcctttaaccataaaaaggccagaaaaatttggtggagatttgacagttaatagctatgaggagttagagagtttatttaaaaataaggaattgcatccaatggatttaaaaaatgctgtagctgaagaacttataaagattttagagccaattagaaagagatta

SEQ ID NO: 312 - DNA, 921 bp, Artificial Sequence
  Synthetic Polynucleotide
atggacgaatttgaaatgataaagagaaacacatctgaaattatcagcgaggaagagttaagagaggttttaaaaaaagatgaaaaatctgctgacataggttttgaaccaagtggtaaaatacatttagggcattatctccaaataaaaaagatgattgatttacaaaatgctggatttgatataattatattgttggctgatttacacgcctatttaaaccagaaaggagagttggatgagattagaaaaataggagattataacaaaaaagtttttgaagcaatggggttaaaggcaaaatatgtttatggaagtgaattccagcttgataaggattatacactgaatgtctatagattggctttaaaaactaccttaaaaagagcaagaaggagtatggaacttatagcaagagaggatgaaaatccaaaggttgctgaagttatctatccaataatgcaggttaatggaatgcattatcaaggcgttgatgttgcagttggagggatggagcagagaaaaatacacatgttagcaagggagcttttaccaaaaaaggttgtttgtattcacaaccctgtcttaacgggtttggatggagaaggaaagatgagttcttcaaaagggaattttatagctgttgatgactctccagaagagattagggctaagataaagaaagcatactgcccagctggagttgttgaaggaaatccaataatggagatagctaaatacttccttgaatatcctttaaccataaaaaggccagaaaaatttggtggagatttgacagttaatagctatgaggagttagagagtttatttaaaaataaggaattgcatccaatggatttaaaaaatgctgtagctgaagaacttataaagattttagagccaattagaaagagattataa

SEQ ID NO: 313 - DNA, 921 bp, Artificial Sequence
  Synthetic Polynucleotide
atggacgaatttgaaatgataaagagaaacacatctgaaattatcagcgaggaagagttaagagaggttttaaaaaaagatgaaaaatctgcttacataggttttgaaccaagtggtaaaatacatttagggcattatctccaaataaaaaagatgattgatttacaaaatgctggatttgatataattatattgttggctgatttacacgcctatttaaaccagaaaggagagttggatgagattagaaaaataggagattataacaaaaaagtttttgaagcaatggggttaaaggcaaaatatgtttatggaagtctattccagcttgataaggattatacactgaatgtctatagattggctttaaaaactaccttaaaaagagcaagaaggagtatggaacttatagcaagagaggatgaaaatccaaaggttgctgaagttatctatccaataatgcaggttaatgatattcattatacaggcgttgatgttgcagttggagggatggagcagagaaaaatacacatgttagcaagggagcttttaccaaaaaaggttgtttgtattcacaaccctgtcttaacgggtttggatggagaaggaaagatgagttcttcaaaagggaattttatagctgttgatgactctccagaagagattagggctaagataaagaaagcatactgcccagctggagttgttgaaggaaatccaataatggagatagctaaatacttccttgaatatcctttaaccataaaaaggccagaaaaatttggtggagatttgacagttaatagctatgaggagttagagagtttatttaaaaataaggaattgcatccaatggatttaaaaaatgctgtagctgaagaacttataaagattttagagccaattagaaagagattataa

SEQ ID NO: 314 - DNA, 921 bp, Artificial Sequence
  Synthetic Polynucleotide
atggacgaatttgaaatgataaagagaaacacatctgaaattatcagcgaggaagagttaagagaggttttaaaaaaagatgaaaaatctgctctaataggttttgaaccaagtggtaaaatacatttagggcattatctccaaataaaaaagatgattgatttacaaaatgctggatttgatataattatattgttgacagatttaaacgcctatttaaaccagaaaggagagttggatgagattagaaaaataggagattataacaaaaaagtttttgaagcaatggggttaaaggcaaaatatgtttatggaagtgaattccagcttgataaggattatacactgaatgtctatagattggctttaaaaactaccttaaaaagagcaagaaggagtatggaacttatagcaagagaggatgaaaatccaaaggttgctgaagttatctatccaataatgcaggttaatgatattcattatttaggcgttgatgttgcagttggagggatggagcagagaaaaatacacatgttagcaagggagcttttaccaaaaaaggttgtttgtattcacaaccctgtcttaacgggtttggatggagaaggaaagatgagttcttcaaaagggaattttatagctgttgatgactctccagaagagattagggctaagataaagaaagcatactgcccagctggagttgttgaaggaaatccaataatggagatagctaaatacttccttgaatatcctttaaccataaaaaggccagaaaaatttggtggagatttgacagttaatagctatgaggagttagagagtttatttaaaaataaggaattgcatccaatggatttaaaaaatgctgtagctgaagaacttataaagattttagagccaattagaaagagattataa

SEQ ID NO: 315 - DNA, 921 bp, Artificial Sequence
  Synthetic Polynucleotide
atggacgaatttgaaatgataaagagaaacacatctgaaattatcagcgaggaagagttaagagaggttttaaaaaaagatgaaaaatctgctctaataggttttgaaccaagtggtaaaatacatttagggcattatctccaaataaaaaagatgattgatttacaaaatgctggatttgatataattatattgttgacagatttaaaagcctatttaaaccagaaaggagagttggatgagattagaaaaataggagattataacaaaaaagtttttgaagcaatggggttaaaggcaaaatatgtttatggaagtgaattccagcttgataaggattatacactgaatgtctatagattggctttaaaaactaccttaaaaagagcaagaaggagtatggaacttatagcaagagaggatgaaaatccaaaggttgctgaagttatctatccaataatgtcagttaatgtaattcattatttaggcgttgatgttgtagttggagggatggagcagagaaaaatacacatgttagcaagggagcttttaccaaaaaaggttgtttgtattcacaaccctgtcttaacgggtttggatggagaaggaaagatgagttcttcaaaagggaattttatagctgttgatgactctccagaagagattagggctaagataaagaaagcatactgcccagctggagttgttgaaggaaatccaataatggagatagctaaatacttccttgaatatcctttaaccataaaaaggccagaaaaatttggtggagatttgacagttaatagctatgaggagttagagagtttatttaaaaataaggaattgcatccaatggatttaaaaaatgctgtagctgaagaacttataaagattttagagccaattagaaagagattataa

SEQ ID NO: 316 - DNA, 921 bp, Artificial Sequence
  Synthetic Polynucleotide
atggacgaatttgaaatgataaagagaaacacatctgaaattatcagcgaggaagagttaagagaggttttaaaaaaagatgaaaaatctgctctaataggttttgaaccaagtggtaaaatacatttagggcattatctccaaataaaaaagatgattgatttacaaaatgctggatttgatataattatattgttgccagatttatcagcctatttaaaccagaaaggagagttggatgagattagaaaaataggagattataacaaaaaagtttttgaagcaatggggttaaaggcaaaatatgtttatggaagtgaattccagcttgataaggattatacactgaatgtctatagattggctttaaaaactaccttaaaaagagcaagaaggagtatggaacttatagcaagagaggatgaaaatccaaaggttgctgaagttatctatccaataatgcaggttaatgatattcattatttaggcgttgatgttgcagttggagggatggagcagagaaaaatacacatgttagcaagggagcttttaccaaaaaaggttgtttgtattcacaaccctgtcttaacgggtttggatggagaaggaaagatgagttcttcaaaagggaattttatagctgttgatgactctccagaagagattagggctaagataaagaaagcatactgcccagctggagttgttgaaggaaatccaataatggagatagctaaatacttccttgaatatcctttaaccataaaaaggccagaaaaatttggtggagatttgacagttaatagctatgaggagttagagagtttatttaaaaataaggaattgcatccaatggatttaaaaaatgctgtagctgaagaacttataaagattttagagccaattagaaagagattataa

SEQ ID NO: 317 - DNA, 921 bp, Artificial Sequence
  Synthetic Polynucleotide
atggacgaatttgaaatgataaagagaaacacatctgaaattatcagcgaggaagagttaagagaggttttaaaaaaagatgaaaaatctgctacaataggttttgaaccaagtggtaaaatacatttagggcattatctccaaataaaaaagatgattgatttacaaaatgctggatttgatataattatattgttggctgatttacacgcctatttaaaccagaaaggagagttggatgagattagaaaaataggagattataacaaaaaagtttttgaagcaatggggttaaaggcaaaatatgtttatggaagtgaattccagcttgataaggattatacactgaatgtctatagattggctttaaaaactaccttaaaaagagcaagaaggagtatggaacttatagcaagagaggatgaaaatccaaaggttgctgaagttatctatccaataatgcaggttaatgatattcattatgcaggcgttgatgttgcagttggagggatggagcagagaaaaatacacatgttagcaagggagcttttaccaaaaaaggttgtttgtattcacaaccctgtcttaacgggtttggatggagaaggaaagatgagttcttcaaaagggaattttatagctgttgatgactctccagaagagattagggctaagataaagaaagcatactgcccagctggagttgttgaaggaaatccaataatggagatagctaaatacttccttgaatatcctttaaccataaaaaggccagaaaaatttggtggagatttgacagttaatagctatgaggagttagagagtttatttaaaaataaggaattgcatccaatggatttaaaaaatgctgtagctgaagaacttataaagattttagagccaattagaaagagattataa

SEQ ID NO: 318 - DNA, 921 bp, Artificial Sequence
  Synthetic Polynucleotide
atggacgaatttgaaatgataaagagaaacacatctgaaattatcagcgaggaagagttaagagaggttttaaaaaaagatgaaaaatctgctacaataggttttgaaccaagtggtaaaatacatttagggcattatctccaaataaaaaagatgattgatttacaaaatgctggatttgatataattatattgttgtccgatttaccagcctatttaaaccagaaaggagagttggatgagattagaaaaataggagattataacaaaaaagtttttgaagcaatggggttaaaggcaaaatatgtttatggaagtgaattccagcttgataaggattatacactgaatgtctatagattggctttaaaaactaccttaaaaagagcaagaaggagtatggaacttatagcaagagaggatgaaaatccaaaggttgctgaagttatctatccaataatgcaggttaatgatattcattatttaggcgttgatgttgcagttggagggatggagcagagaaaaatacacatgttagcaagggagcttttaccaaaaaaggttgtttgtattcacaaccctgtcttaacgggtttggatggagaaggaaagatgagttcttcaaaagggaattttatagctgttgatgactctccagaagagattagggctaagataaagaaagcatactgcccagctggagttgttgaaggaaatccaataatggagatagctaaatacttccttgaatatcctttaaccataaaaaggccagaaaaatttggtggagatttgacagttaatagctatgaggagttagagagtttatttaaaaataaggaattgcatccaatggatttaaaaaatgctgtagctgaagaacttataaagattttagagccaattagaaagagattataa

SEQ ID NO: 319 - DNA, 921 bp, Artificial Sequence
  Synthetic Polynucleotide
atggacgaatttgaaatgataaagagaaacacatctgaaattatcagcgaggaagagttaagagaggttttaaaaaaagatgaaaaatctgctacaataggttttgaaccaagtggtaaaatacatttagggcattatctccaaataaaaaagatgattgatttacaaaatgctggatttgatataattatattgttggctgatttacacgcctatttaaaccagaaaggagagttggatgagattagaaaaataggagattataacaaaaaagtttttgaagcaatggggttaaaggcaaaatatgtttatggaagtatgttccagcttgataaggattatacactgaatgtctatagattggctttaaaaactaccttaaaaagagcaagaaggagtatggaacttatagcaagagaggatgaaaatccaaaggttgctgaagttatctatccaataatgcaggttaattcatcacattatgacggcgttgatgttgcagttggagggatggagcagagaaaaatacacatgttagcaagggagcttttaccaaaaaaggttgtttgtattcacaaccctgtcttaacgggtttggatggagaaggaaagatgagttcttcaaaagggaattttatagctgttgatgactctccagaagagattagggctaagataaagaaagcatactgcccagctggagttgttgaaggaaatccaataatggagatagctaaatacttccttgaatatcctttaaccataaaaaggccagaaaaatttggtggagatttgacagttaatagctatgaggagttagagagtttatttaaaaataaggaattgcatccaatggatttaaaaaatgctgtagctgaagaacttataaagattttagagccaattagaaagagattataa

SEQ ID NO: 320 - DNA, 921 bp, Artificial Sequence
  Synthetic Polynucleotide
atggacgaatttgaaatgataaagagaaacacatctgaaattatcagcgaggaagagttaagagaggttttaaaaaaagatgaaaaatctgctcaaataggttttgaaccaagtggtaaaatacatttagggcattatctccaaataaaaaagatgattgatttacaaaatgctggatttgatataattatattgttgccagatttacacgcctatttaaaccagaaaggagagttggatgagattagaaaaataggagattataacaaaaaagtttttgaagcaatggggttaaaggcaaaatatgtttatggaagtgaattccagcttgataaggattatacactgaatgtctatagattggctttaaaaactaccttaaaaagagcaagaaggagtatggaacttatagcaagagaggatgaaaatccaaaggttgctgaagttatctatccaataatgcaggttaatgatattcattatttaggcgttgatgttgacgttggagggatggagcagagaaaaatacacatgttagcaagggagcttttaccaaaaaaggttgtttgtattcacaaccctgtcttaacgggtttggatggagaaggaaagatgagttcttcaaaagggaattttatagctgttgatgactctccagaagagattagggctaagataaagaaagcatactgcccagctggagttgttgaaggaaatccaataatggagatagctaaatacttccttgaatatcctttaaccataaaaaggccagaaaaatttggtggagatttgacagttaatagctatgaggagttagagagtttatttaaaaataaggaattgcatccaatggatttaaaaaatgctgtagctgaagaacttataaagattttagagccaattagaaagagattataa

SEQ ID NO: 321 - DNA, 921 bp, Artificial Sequence
  Synthetic Polynucleotide
atggacgaatttgaaatgataaagagaaacacatctgaaattatcagcgaggaagagttaagagaggttttaaaaaaagatgaaaaatctgctcacataggttttgaaccaagtggtaaaatacatttagggcattatctccaaataaaaaagatgattgatttacaaaatgctggatttgatataattatattgttggctgatttacacgcctatttaaaccagaaaggagagttggatgagattagaaaaataggagattataacaaaaaagtttttgaagcaatggggttaaaggcaaaatatgtttatggaagtgcattccagcttgataaggattatacactgaatgtctatagattggctttaaaaactaccttaaaaagagcaagaaggagtatggaacttatagcaagagaggatgaaaatccaaaggttgctgaagttatctatccaataatgcaggttaatggacaccattatataggcgttgatgttgcagttggagggatggagcagagaaaaatacacatgttagcaagggagcttttaccaaaaaaggttgtttgtattcacaaccctgtcttaacgggtttggatggagaaggaaagatgagttcttcaaaagggaattttatagctgttgatgactctccagaagagattagggctaagataaagaaagcatactgcccagctggagttgttgaaggaaatccaataatggagatagctaaatacttccttgaatatcctttaaccataaaaaggccagaaaaatttggtggagatttgacagttaatagctatgaggagttagagagtttatttaaaaataaggaattgcatccaatggatttaaaaaatgctgtagctgaagaacttataaagattttagagccaattagaaagagattataa

SEQ ID NO: 322 - DNA, 921 bp, Artificial Sequence
  Synthetic Polynucleotide
atggacgaatttgaaatgataaagagaaacacatctgaaattatcagcgaggaagagttaagagaggttttaaaaaaagatgaaaaatctgcttacataggttttgaaccaagtggtaaaatacatttagggcattatctccaaataaaaaagatgattgatttacaaaatgctggatttgatataattatattgttggctgatttacacgcctatttaaaccagaaaggagagttggatgagattagaaaaataggagattataacaaaaaagtttttgaagcaatggggttaaaggcaaaatatgtttatggaagtgcattccagcttgataaggattatacactgaatgtctatagattggctttaaaaactaccttaaaaagagcaagaaggagtatggaacttatagcaagagaggatgaaaatccaaaggttgctgaagttatctatccaataatgcaggttaattgcgcacattatttaggcgttgatgttgcagttggagggatggagcagagaaaaatacacatgttagcaagggagcttttaccaaaaaaggttgtttgtattcacaaccctgtcttaacgggtttggatggagaaggaaagatgagttcttcaaaagggaattttatagctgttgatgactctccagaagagattagggctaagataaagaaagcatactgcccagctggagttgttgaaggaaatccaataatggagatagctaaatacttccttgaatatcctttaaccataaaaaggccagaaaaatttggtggagatttgacagttaatagctatgaggagttagagagtttatttaaaaataaggaattgcatccaatggatttaaaaaatgctgtagctgaagaacttataaagattttagagccaattagaaagagattataa

SEQ ID NO: 323 - DNA, 917 bp, Artificial Sequence
  Synthetic Polynucleotide
atggacgaatttgaaatgataaagagaaacacatctgaaattatcagcgaggaagagttaagagaggttttaaaaaaagatgaaaaatctgctggtataggttttgaaccaagtggtaaaatacatttagggcattatctccaaataaaaaagatgattgatttacaaaatgctggatttgatataattatattgttggctgatttacacgcctatttaaaccagaaaggagagttggatgagattagaaaaataggagattataacaaaaaagtttttgaagcaatggggttaaaggcaaaatatgtttatggaagttccttccagcttgataaggattatacactgaatgtctatagattggctttaaaaactaccttaaaaagagcaagaaggagtatggaacttatagaagagaggatgaaaatccaaaggttgctgaagttatctatccaataatgcaggttaatacgagtcattatctgggcgttgatgttgcagttggagggatggagcagagaaaaatacacatgttagcaagggagcttttaccaaaaaaggttgtttgtattcacaaccctgtcttaacgggtttggatggagaaggaaagatgagttcttcaaaagggaattttatagctgttgatgactctccagaagagattagggctaagataaagaaagcatactgcccagctggagttgttgaaggaaatccaataatggagatagctaaatacttccttgaatatcctttaaccataaaaaggccagaaaaatttggtggagatttgacagttaatagctatgaggagttagagagtttatttaaaaataaggaattgcatccaatggatttaaaaaatgctgtagctgaagaacttataaagattttagagccaattagaaagagatta

SEQ ID NO: 324 - DNA, 917 bp, Artificial Sequence
  Synthetic Polynucleotide
atggacgaatttgaaatgataaagagaaacacatctgaaattatcagcgaggaagagttaagagaggttttaaaaaaagatgaaaaatctgctacgataggttttgaaccaagtggtaaaatacatttagggcattatctccaaataaaaaagatgattgatttacaaaatgctggatttgatataattatattgttggctgatttacacgcctatttaaaccagaaaggagagttggatgagattagaaaaataggagattataacaaaaaagtttttgaagcaatggggttaaaggcaaaatatgtttatggaagtaatttccagcttgataaggattatacactgaatgtctatagattggctttaaaaactaccttaaaaagagcaagaaggagtatggaacttatagaagagaggatgaaaatccaaaggttgctgaagttatctatccaataatgcaggttaatccgcttcattatcagggcgttgatgttgcagttggagggatggagcagagaaaaatacacatgttagcaagggagcttttaccaaaaaaggttgtttgtattcacaaccctgtcttaacgggtttggatggagaaggaaagatgagttcttcaaaagggaattttatagctgttgatgactctccagaagagattagggctaagataaagaaagcatactgcccagctggagttgttgaaggaaatccaataatggagatagctaaatacttccttgaatatcctttaaccataaaaaggccagaaaaatttggtggagatttgacagttaatagctatgaggagttagagagtttatttaaaaataaggaattgcatccaatggatttaaaaaatgctgtagctgaagaacttataaagattttagagccaattagaaagagatta

SEQ ID NO: 325 - DNA, 917 bp, Artificial Sequence
  Synthetic Polynucleotide
atggacgaatttgaaatgataaagagaaacacatctgaaattatcagcgaggaagagttaagagaggttttaaaaaaagatgaaaaatctgctacgataggttttgaaccaagtggtaaaatacatttagggcattatctccaaataaaaaagatgattgatttacaaaatgctggatttgatataattatattgttggctgatttacacgcctatttaaaccagaaaggagagttggatgagattagaaaaataggagattataacaaaaaagtttttgaagcaatggggttaaaggcaaaatatgtttatggaagtctgttccagcttgataaggattatacactgaatgtctatagattggctttaaaaactaccttaaaaagagcaagaaggagtatggaacttatagaagagaggatgaaaatccaaaggttgctgaagttatctatccaataatgcaggttaatcctcttcattatgagggcgttgatgttgcagttggagggatggagcagagaaaaatacacatgttagcaagggagcttttaccaaaaaaggttgtttgtattcacaaccctgtcttaacgggtttggatggagaaggaaagatgagttcttcaaaagggaattttatagctgttgatgactctccagaagagattagggctaagataaagaaagcatactgcccagctggagttgttgaaggaaatccaataatggagatagctaaatacttccttgaatatcctttaaccataaaaaggccagaaaaatttggtggagatttgacagttaatagctatgaggagttagagagtttatttaaaaataaggaattgcatccaatggatttaaaaaatgctgtagctgaagaacttataaagattttagagccaattagaaagagatta

SEQ ID NO: 326 - DNA, 917 bp, Artificial Sequence
  Synthetic Polynucleotide
atggacgaatttgaaatgataaagagaaacacatctgaaattatcagcgaggaagagttaagagaggttttaaaaaaagatgaaaaatctgctcttataggttttgaaccaagtggtaaaatacatttagggcattatctccaaataaaaaagatgattgatttacaaaatgctggatttgatataattatattgttggctgatttacacgcctatttaaaccagaaaggagagttggatgagattagaaaaataggagattataacaaaaaagtttttgaagcaatggggttaaaggcaaaatatgtttatggaagtactttccagcttgataaggattatacactgaatgtctatagattggctttaaaaactaccttaaaaagagcaagaaggagtatggaacttatagaagagaggatgaaaatccaaaggttgctgaagttatctatccaataatgcaggttaatccggttcattatcagggcgttgatgttgcagttggagggatggagcagagaaaaatacacatgttagcaagggagcttttaccaaaaaaggttgtttgtattcacaaccctgtcttaacgggtttggatggagaaggaaagatgagttcttcaaaagggaattttatagctgttgatgactctccagaagagattagggctaagataaagaaagcatactgcccagctggagttgttgaaggaaatccaataatggagatagctaaatacttccttgaatatcctttaaccataaaaaggccagaaaaatttggtggagatttgacagttaatagctatgaggagttagagagtttatttaaaaataaggaattgcatccaatggatttaaaaaatgctgtagctgaagaacttataaagattttagagccaattagaaagagatta

SEQ ID NO: 327 - DNA, 917 bp, Artificial Sequence
  Synthetic Polynucleotide
atggacgaatttgaaatgataaagagaaacacatctgaaattatcagcgaggaagagttaagagaggttttaaaaaaagatgaaaaatctgctactataggttttgaaccaagtggtaaaatacatttagggcattatctccaaataaaaaagatgattgatttacaaaatgctggatttgatataattatattgttggctgatttacacgcctatttaaaccagaaaggagagttggatgagattagaaaaataggagattataacaaaaaagtttttgaagcaatggggttaaaggcaaaatatgtttatggaagttcgttccagcttgataaggattatacactgaatgtctatagattggctttaaaaactaccttaaaaagagcaagaaggagtatggaacttatagaagagaggatgaaaatccaaaggttgctgaagttatctatccaataatgcaggttaatccactgcattatcagggcgttgatgttgcagttggagggatggagcagagaaaaatacacatgttagcaagggagcttttaccaaaaaaggttgtttgtattcacaaccctgtcttaacgggtttggatggagaaggaaagatgagttcttcaaaagggaattttatagctgttgatgactctccagaagagattagggctaagataaagaaagcatactgcccagctggagttgttgaaggaaatccaataatggagatagctaaatacttccttgaatatcctttaaccataaaaaggccagaaaaatttggtggagatttgacagttaatagctatgaggagttagagagtttatttaaaaataaggaattgcatccaatggatttaaaaaatgctgtagctgaagaacttataaagattttagagccaattagaaagagatta

SEQ ID NO: 328 - DNA, 2799 bp, Artificial Sequence
  Synthetic Polynucleotide
atgagcgatttcaggataattgaggagaagtggcagaaggcgtgggagaaggacagaatttttgagtccgatcctaatgagaaggagaagttttttctcacaattccctatccttaccttaatggaaatcttcacgcaggtcacacgagaaccttcacaattggcgatgccttcgccagatacatgagaatgaagggctacaacgttctctttcccctcggctttcatgttacgggcaccccaatcattggccttgcggagctcatagccaagagggacgagaggacgatagaggtttacaccaaataccatgacgttccgctggaggacttgcttcagctcacaactccagagaaaatcgttgagtacttctcaagggaggcgctgcaggctttgaagagcataggctactccattgactggaggagggttttcaccacaaccgatgaagagtatcagagattcatcgagtggcagtactggaagctcaaggagcttggcctgattgtgaagggcacccaccccgtcagatactgcccccacgaccagaatcctgttgaagaccacgaccttctcgctggggaggaggcaactattgttgaatttaccgttataaagttcaggcttgaagatggagacctcattttcccctgtgcaactctccgtcccgaaaccgtgtttggcgtcacgaacatctgggtaaagccgacaacctacgtaattgccgaggtggatggggaaaagtggtttgtgagcaaagaggcttacgagaagctcacctacacggagaaaaaagtcaggctgctggaggaggttgatgcgtcgcagttcttcggcaagtacgtcatagtcccgctggtaaacagaaaagtgccaattctgcctgcagagtttgttgacaccgacaacgcaacaggagttgtgatgagcgttcccgcacacgctccttttgacctggctgccattgaggacttgaagagagacgaggaaacgctggcgaagtacggaattgacaaaagcgttgtagagagcataaagccaatagttctgattaagacggacattgaaggtgttcctgctgagaagctaataagagagcttggagtgaagagccagaaggacaaggagctgctggataaggcaaccaagaccctctacaagaaggagtaccacacgggaatcatgctggacaacacgatgaactatgctggaatgaaagtttctgaggcgaaggagagagttcatgaggatttggttaagcttggcttgggggatgttttctacgagttcagcgagaagcccgtaatctgcaggtgcggaacgaagtgcgttgttaaggttgttagggaccagtggttcctgaactactccaacagagagtggaaggagaaggttctgaatcaccttgaaaagatgcgaatcatccccgactactacaaggaggagttcaggaacaagattgagtggctcagggacaaggcttgtgccagaaggaaggggcttggaacgagaattccgtgggataaggagtggctcatcgagagcctttcagactcaacaatctacatggcctactacatccttgccaagtacatcaacgcaggattgctcaaggccgagaacatgactcccgagttcctcgactacgtgctgctgggcaaaggtgaggttgggaaagttgcggaagcttcaaaactcagcgtggagttaatccagcagatcagggacgacttcgagtactggtatcccgttgacctaagaagcagtggcaaggacttggttgcaaaccacctgctcttctacctcttccaccacgtcgccattttcccgccagataagtggccgagggcaattgccgtaaacggatacgtcagccttgagggcaagaagatgagcaagagcaaagggcccttgctaacgatgaagagggcggtgcagcagtatggtgcggatgtgacgaggctctacatcctccacgctgcagagtacgacagcgatgcggactggaagagcagagaggttgaagggcttgcaaaccacctcaggaggttctacaacctcgtgaaggagaactacctgaaagaggtgggagagctaacaaccctcgaccgctggcttgtgagcaggatgcagagggcaataaaggaagtgagggaggctatggacaacctgcagacgaggagggccgtgaatgccgccttcttcgagctcatgaacgacgtgagatggtatctgaggagaggaggtgagaacctcgctataatactggacgactggatcaagctcctcgccccctttgctccgcacatttgcgaggagctgtggcacttgaagcatgacagctacgtcagcctcgaaagctacccagaatacgacgaaaccagggttgacgaggaggcggagagaattgaggaatacctccgaaaccttgttgaggacattcaggaaatcaagaagtttgttagcgatgcgaaggaggtttacattgctcccgccgaagactggaaggttaaggcagcaaaggtcgttgctgaaagcggggatgttggggaggcgatgaagcagcttatgcaggacgaggagcttaggaagctcggcaaagaagtgtcaaatttcgtcaagaagattttcaaagacagaaagaagctgatgctagttaaggagtgggaagttctgcagcagaacctgaaatttattgagaatgagaccggactgaaggttattcttgatactcagagagttcctgaggagaagaggaggcaggcagttccgggcaagcccgcgatttatgttgcttaa

SEQ ID NO: 329 - DNA, 2814 bp, Artificial Sequence
  Synthetic Polynucleotide
gtggatattgaaagaaaatggcgtgatagatggagagatgctggcatatttcaggctgaccctgatgacagagaaaagatattcctcacagtcgcttacccctaccccagtggtgcgatgcacataggacacgggaggacctacactgtccctgatgtctatgcacggttcaagaggatgcagggctacaacgtcctgtttcccatggcctggcatgtcacaggggcccctgtcatagggatagcgcggaggattcagaggaaggatccctggaccctcaaaatctacagggaggtccacagggtccccgaggatgagcttgaacgtttcagtgaccctgagtacatagttgaatacttcagcagggaataccggtctgttatggaggatatgggctactccatcgactggaggcgtgaattcaaaaccacggatcccacctacagcaggttcatacagtggcagataaggaagctgagggaccttggcctcgtaaggaagggcgcccatcctgttaagtactgccctgaatgtgaaaaccctgtgggtgaccatgacctccttgagggtgagggggttgccataaaccagctcacactcctcaaattcaaacttggagactcatacctggtcgcagccaccttcaggcccgagacaatctatggggccaccaacctctggctgaaccctgatgaggattatgtgagggttgaaacaggtggtgaggagtggataataagcagggctgccgtggataatctttcacaccagaaactggacctcaaggtttccggtgacgtcaaccccggggacctgatagggatgtgcgtggagaatcctgtgacgggccaggaacaccccatactcccggcttccttcgttgaccctgaatatgccacaggtgttgtgttctctgtccctgcacatgcccctgcagacttcatagcccttgaggacctcaggacagaccatgaactccttgaaaggtacggtcttgaggatgtggttgctgatattgagcccgtgaatgtcatagcagtggatggctacggtgagttcccggcggccgaggttatagagaaatttggtgtcagaaaccaggaggacccccgccttgaggatgccaccggggagctatacaagatcgagcatgcgaggggtgttatgagcagccacatccctgtctatggtggtatgaaggtctctgaggcccgtgaggtcatcgctgatgaactgaaggaccagggccttgcagatgagatgtatgaattcgctgagcgacctgttatatgccgctgcggtggcaggtgcgttgtgagggtcatggaggaccagtggttcatgaagtactctgatgacgcctggaaggacctcgcccacaggtgcctcgatggcatgaagataatacccgaggaggtccgggccaactttgaatactacatcgactggctcaatgactgggcatgttcaaggaggataggccttggaacaaggctgccctgggatgagaggtggatcatcgaacccctcacagactcaacaatctacatggcatattacaccatcgcacaccgcctcagggagatggatgccggggagatggacgatgagttctttgatgccatattcctagatgattcaggaacctttgaggatctcagggaggaattccggtactggtacccccttgactggaggctctctgcaaaggacctcataggcaatcacctgacattccatatattccaccactcagccatattccctgagtcagggtggccccggggggctgtggtctttggtatgggccttcttgagggcaacaagatgtcatcctccaagggcaacgtcatactcctgagggatgccatcgagaagcacggtgcagacgtggtgcggctcttcctcatgtcctcagcagagccatggcaggactttgactggagggagagtgaggtcatcgggacccgcaggaggattgaatggttcagggaattcggagagagggtctcaggtatcctggatggtaggccagtcctcagtgaggttactccagctgaacctgaaagcttcattggaaggtggatgatgggtcagctgaaccagaggatacgtgaagccacaagggcccttgaatcattccagacaagaaaggcagttcaggaggcactctatctccttaaaaaggatgttgaccactaccttaagcgtgttgagggtagagttgatgatgaggttaaatctgtccttgcaaacgttctgcacgcctggataaggctcatggctccattcataccctacactgctgaggagatgtgggagaggtatggtggtgagggttttgtagcagaagctccatggcctgacttctcagatgatgcagagagcagggatgtgcaggttgcagaggagatggtccagaataccgttagagacattcaggaaatcatgaagatccttggatccaccccggagagggtccacatatacacctcaccaaaatggaaatgggatgtgctaagggtcgcagcagaggtaggaaaactagatatgggctccataatgggaagggtttcagctgagggcatccatgataacatgaaggaggttgctgaatttgtaaggaggatcatcagggaccttggtaaatcagaggttacggtgatagacgagtacagcgtactcatggatgcatctgattacattgaatcagaggttggagccagggttgtgatacacagcaaaccagactatgaccctgaaaacaaggctgtgaatgccgttcccctgaagccagccatataccttgaatga

SEQ ID NO: 330 - protein, 306 aa, Artificial Sequence
  Synthetic Polypeptide
MDEFEMIKRNTSEIISEEELREVLKKDEKSAQIGFEPSGKIHLGHYLQIKKMIDLQNAGFDIIILLADLHAYLNQKGELDEIRKIGDYNKKVFEAMGLKAKYVYGSTFQLDKDYTLNVYRLALKTTLKRARRSMELIAREDENPKVAEVIYPIMQVNAIHYPGVDVAVGGMEQRKIHMLARELLPKKVVCIHNPVLTGLDGEGKMSSSKGNFIAVDDSPEEIRAKIKKAYCPAGVVEGNPIMEIAKYFLEYPLTIKRPEKFGGDLTVSSYEELESLFKNKELHPMDLKNAVAEELIKILEPIRKRL

SEQ ID NO: 331 - protein, 255 aa, Artificial Sequence
  Synthetic Polypeptide
MDEFEMIKRNTSEIISEEELREVLKKDEKSALIGFEPSGKIHLGHYLQIKKMIDLQNAGFDIIILLADLHAYLNQKGELDEIRKIGDYNKKVFEAMGLKAKYVYGSEFQLDKDYTLNVYRLALKTTLKRARRSMELIAREDENPKVAEVIYPIMQVNPAHYQGVDVVVGGMEQRKIHMLARELLPKKVVCIHNPVLTGLDGEGKMSSSKGNFIAVDDSPEEIRAKIKKAYCPAGVVEGNPIMEIAKYFLEYPLTI

SEQ ID NO: 332 - protein, 306 aa, Artificial Sequence
  Synthetic Polypeptide
MDEFEMIKRNTSEIISEEELREVLKKDEKSAGIGFEPSGKIHLGHYLQIKKMIDLQNAGFDIIILLADLHAYLNQKGELDEIRKIGDYNKKVFEAMGLKAKCAYGSPFQLDKDYTLNVYRLALKTTLKRARRSMELIAREDENPKVAEVIYPIMQVNGYHYLGVDVAVGGMEQRKIHMLARELLPKKVVCIHNPVLTGLDGEGKMSSSKGNFIAVDDSPEEIRAKIKKAYCPAGVVEGNPIMEIAKYFLEYPLTIKRPEKFGGDLTVNSYEELESLFKNKELHPMDLKNAVAEELIKILEPIRKRL

SEQ ID NO: 333 - protein, 306 aa, Artificial Sequence
  Synthetic Polypeptide
MDEFEMIKRNTSEIISEEELREVLKKDEKSAQIGFEPSGKIHLGHYLQIKKMIDLQNAGFDIIILLADLHAYLNQKGELDEIRKIGDYNKKVFEAMGLKAKYVYGSPFQLDKDYTLNVYRLALKTTLKRARRSMELIAREDENPKVAEVIYPIMQVNCSHYYGVDVAVGGMEQRKIHMLARELLPKKVVCIHNPVLTGLDGEGKMSSSKGNFIAVDDSPEEIRAKIKKAYCPAGVVEGNPIMEIAKYFLEYPLTIKRPEKFGGDLTVNSYEELESLFKNKELHPMDLKNAVAEELIKILEPIRKRL

SEQ ID NO: 334 - protein, 306 aa, Artificial Sequence
  Synthetic Polypeptide
MDEFEMIKRNTSEIISEEELREVLKKDEKSATIGFEPSGKIHLGHYLQIKKMIDLQNAGFDIIILLADLHAYLNQKGELDEIRKIGDYNKKVFEAMGLKAKYVYGSTFQLDKDYTLNVYRLALKTTLKRARRSMELIAREDENPKVAEVIYPIMQVNPLHYAGVDVAVGGMEQRKIHMLARELLPKKVVCIHNPVLTGLDGEGKMSSSKGNFIAVDDSPEEIRAKIKKAYCPAGVVEGNPIMEIAKYFLEYPLTIKRPEKFGGDLTVNSYEELESLFKNKELHPMDLKNAVAEELIKILEPIRKRL

SEQ ID NO: 335 - protein, 306 aa, Artificial Sequence
  Synthetic Polypeptide
MDEFEMIKRNTSEIISEEELREVLKKDEKSAHIGFEPSGKIHLGHYLQIKKMIDLQNAGFDIIILLADLHAYLNQKGELDEIRKIGDYNKKVFEAMGLKAKYVYGSEFQLDKDYTLNVYRLALKTTLKRARRSMELIAREDENPKVAEVIYPIMQVNRPHYLGVDVAVGGMEQRKIHMLARELLPKKVVCIHNPVLTGLDGEGKMSSSKGNFIAVDDSPEEIRAKIKKAYCPAGVVEGNPIMEIAKYFLEYPLTIKRPEKFGGDLTVNSYEELESLFKNKELHPMDLKNAVAEELIKILEPIRKRL

SEQ ID NO: 336 - protein, 306 aa, Artificial Sequence
  Synthetic Polypeptide
MDEFEMIKRNTSEIISEEELREVLKKDEKSAQIGFEPSGKIHLGHYLQIKKMIDLQNAGFDIIILLADLHAYLNQKGELDEIRKIGDYNKKVFEAMGLKAKYVYGSPFQLDKDYTLNVYRLALKTTLKRARRSMELIAREDENPKVAEVIYPIMQVNQSHYDGVDVAVGGMEQRKIHMLARELLPKKVVCIHNPVLTGLDGEGKMSSSKGNFIAVDDSPEEIRAKIKKAYCPAGVVEGNPIMEIAKYFLEYPLTIKRPEKFGGDLTVNSYEELESLFKNKELHPMDLKNAVAEELIKILEPIRKRL

SEQ ID NO: 337 - protein, 306 aa, Artificial Sequence
  Synthetic Polypeptide
MDEFEMIKRNTSEIISEEELREVLKKDEKSASIGFEPSGKIHLGHYLQIKKMIDLQNAGFDIIILLADLHAYLNQKGELDEIRKIGDYNKKVFEAMGLKAKYVYGSTFQLDKDYTLNVYRLALKTTLKRARRSMELIAREDENPKVAEVIYPIMQVNTYHYAGVDVAVGGMEQRKIHMLARELLPKKVVCIHNPVLTGLDGEGKMSSSKGNFIAVDDSPEEIRAKIKKAYCPAGVVEGNPIMEIAKYFLEYPLTIKRPEKFGGDLTVNSYEELESLFKNKELHPMDLKNAVAEELIKILEPIRKRL

SEQ ID NO: 338 - protein, 306 aa, Artificial Sequence
  Synthetic Polypeptide
MDEFEMIKRNTSEIISEEELREVLKKDEKSAPIGFEPSGKIHLGHYLQIKKMIDLQNAGFDIIILLADLHAYLNQKGELDEIRKIGDYNKKVFEAMGLKAKYVYGSMFQLDKDYTLNVYRLALKTTLKRARRSMELIAREDENPKVAEVIYPIMQVNNTHYGGVDVAVGGMEQRKIHMLARELLPKKVVCIHNPVLTGLDGEGKMSSSKGNFIAVDDSPEEIRAKIKKAYCPAGVVEGNPIMEIAKYFLEYPLTIKRPEKFGGDLTVNSYEELESLFKNKELHPMDLKNAVAEELIKILEPIRKRL

SEQ ID NO: 339 - protein, 306 aa, Artificial Sequence
  Synthetic Polypeptide
MDEFEMIKRNTSEIISEEELREVLKKDEKSATIGFEPSGKIHLGHYLQIKKMIDLQNAGFDIIILLADLHAYLNQKGELDEIRKIGDYNKKVFEAMGLKAKYVYGSHFQLDKDYTLNVYRLALKTTLKRARRSMELIAREDENPKVAEVIYPIMQVNQTHYEGVDVAVGGMEQRKIHMLARELLPKKVVCIHNPVLTGLDGEGKMSSSKGNFIAVDDSPEEIRAKIKKAYCPAGVVEGNPIMEIAKYFLEYPLTIKRPEKFGGDLTVNSYEELESLFKNKELHPMDLKNAVAEELIKILEPIRKRL

SEQ ID NO: 340 - protein, 306 aa, Artificial Sequence
  Synthetic Polypeptide
MDEFEMIKRNTSEIISEEELREVLKKDEKSAHIGFEPSGKIHLGHYLQIKKMIDLQNAGFDIIILLADLHAYLNQKGELDEIRKIGDYNKKVFEAMGLKAKYVYGSKFQLDKDYTLNVYRLALKTTLKRARRSMELIAREDENPKVAEVIYPIMQVNPCHYHGVDVAVGGMEQRKIHMLARELLPKKVVCIHNPVLTGLDGEGKMSSSKGNFIAVDDSPEEIRAKIKKAYCPAGVVEGNPIMEIAKYFLEYPLTIKRPEKFGGDLTVNSYEELESLFKNKELHPMDLKNAVAEELIKILEPIRKRL

SEQ ID NO: 341 - protein, 306 aa, Artificial Sequence
  Synthetic Polypeptide
MDEFEMIKRNTSEIISEEELREVLKKDEKSAAIGFEPSGKIHLGHYLQIKKMIDLQNAGFDIIILLADLHAYLNQKGELDEIRKIGDYNKKVFEAMGLKAKYVYGSRFQLDKDYTLNVYRLALKTTLKRARRSMELIAREDENPKVAEVIYPIMQVNVYHYDGVDVAVGGMEQRKIHMLARELLPKKVVCIHNPVLTGLDGEGKMSSSKGNFIAVDDSPEEIRAKIKKAYCPAGVVEGNPIMEIAKYFLEYPLTIKRPEKFGGDLTVNSYEELESLFKNKELHPMDLKNAVAEELIKILEPIRKRL

SEQ ID NO: 342 - protein, 306 aa, Artificial Sequence
  Synthetic Polypeptide
MDEFEMIKRNTSEIISEEELREVLKKDEKSAGIGFEPSGKIHLGHYLQIKKMIDLQNAGFDIIILLADLHAYLNQKGELDEIRKIGDYNKKVFEAMGLKAKYVYGSTFQLDKDYTLNVYRLALKTTLKRARRSMELIAREDENPKVAEVIYPIMQVNTYYYLGVDVAVGGMEQRKIHMLARELLPKKVVCIHNPVLTGLDGEGKMSSSKGNFIAVDDSPEEIRAKIKKAYCPAGVVEGNPIMEIAKYFLEYPLTIKRPEKFGGDLTVNSYEELESLFKNKELHPMDLKNAVAEELIKILEPIRKRL

SEQ ID NO: 343 - protein, 306 aa, Artificial Sequence
  Synthetic Polypeptide
MDEFEMIKRNTSEIISEEELREVLKKDEKSALIGFEPSGKIHLGHYLQIKKMIDLQNAGFDIIILLADLHAYLNQKGELDEIRKIGDYNKKVFEAMGLKAKYVYGSPFQLDKDYTLNVYRLALKTTLKRARRSMELIAREDENPKVAEVIYPIMQVNQIHSSGVDVAVGGMEQRKIHMLARELLPKKVVCIHNPVLTGLDGEGKMSSSKGNFIAVDDSPEEIRAKIKKAYCPAGVVEGNPIMEIAKYFLEYPLTIKRPEKFGGDLTVNSYEELESLFKNKELHPMDLKNAVAEELIKILEPIRKRL

SEQ ID NO: 344 - protein, 306 aa, Artificial Sequence
  Synthetic Polypeptide
MDEFEMIKRNTSEIISEEELREVLKKDEKSADIGFEPSGKIHLGHYLQIKKMIDLQNAGFDIIILLADLHAYLNQKGELDEIRKIGDYNKKVFEAMGLKAKYVYGSEFQLDKDYTLNVYRLALKTTLKRARRSMELIAREDENPKVAEVIYPIMQVNGMHYQGVDVAVGGMEQRKIHMLARELLPKKVVCIHNPVLTGLDGEGKMSSSKGNFIAVDDSPEEIRAKIKKAYCPAGVVEGNPIMEIAKYFLEYPLTIKRPEKFGGDLTVNSYEELESLFKNKELHPMDLKNAVAEELIKILEPIRKRL

SEQ ID NO: 345 - protein, 306 aa, Artificial Sequence
  Synthetic Polypeptide
MDEFEMIKRNTSEIISEEELREVLKKDEKSAYIGFEPSGKIHLGHYLQIKKMIDLQNAGFDIIILLADLHAYLNQKGELDEIRKIGDYNKKVFEAMGLKAKYVYGSLFQLDKDYTLNVYRLALKTTLKRARRSMELIAREDENPKVAEVIYPIMQVNDIHYTGVDVAVGGMEQRKIHMLARELLPKKVVCIHNPVLTGLDGEGKMSSSKGNFIAVDDSPEEIRAKIKKAYCPAGVVEGNPIMEIAKYFLEYPLTIKRPEKFGGDLTVNSYEELESLFKNKELHPMDLKNAVAEELIKILEPIRKRL

SEQ ID NO: 346 - protein, 306 aa, Artificial Sequence
  Synthetic Polypeptide
MDEFEMIKRNTSEIISEEELREVLKKDEKSALIGFEPSGKIHLGHYLQIKKMIDLQNAGFDIIILLTDLNAYLNQKGELDEIRKIGDYNKKVFEAMGLKAKYVYGSEFQLDKDYTLNVYRLALKTTLKRARRSMELIAREDENPKVAEVIYPIMQVNDIHYLGVDVAVGGMEQRKIHMLARELLPKKVVCIHNPVLTGLDGEGKMSSSKGNFIAVDDSPEEIRAKIKKAYCPAGVVEGNPIMEIAKYFLEYPLTIKRPEKFGGDLTVNSYEELESLFKNKELHPMDLKNAVAEELIKILEPIRKRL

SEQ ID NO: 347 - protein, 306 aa, Artificial Sequence
  Synthetic Polypeptide
MDEFEMIKRNTSEIISEEELREVLKKDEKSALIGFEPSGKIHLGHYLQIKKMIDLQNAGFDIIILLTDLKAYLNQKGELDEIRKIGDYNKKVFEAMGLKAKYVYGSEFQLDKDYTLNVYRLALKTTLKRARRSMELIAREDENPKVAEVIYPIMSVNVIHYLGVDVVVGGMEQRKIHMLARELLPKKVVCIHNPVLTGLDGEGKMSSSKGNFIAVDDSPEEIRAKIKKAYCPAGVVEGNPIMEIAKYFLEYPLTIKRPEKFGGDLTVNSYEELESLFKNKELHPMDLKNAVAEELIKILEPIRKRL

SEQ ID NO: 348 - protein, 306 aa, Artificial Sequence
  Synthetic Polypeptide
MDEFEMIKRNTSEIISEEELREVLKKDEKSALIGFEPSGKIHLGHYLQIKKMIDLQNAGFDIIILLPDLSAYLNQKGELDEIRKIGDYNKKVFEAMGLKAKYVYGSEFQLDKDYTLNVYRLALKTTLKRARRSMELIAREDENPKVAEVIYPIMQVNDIHYLGVDVAVGGMEQRKIHMLARELLPKKVVCIHNPVLTGLDGEGKMSSSKGNFIAVDDSPEEIRAKIKKAYCPAGVVEGNPIMEIAKYFLEYPLTIKRPEKFGGDLTVNSYEELESLFKNKELHPMDLKNAVAEELIKILEPIRKRL

SEQ ID NO: 349 - protein, 306 aa, Artificial Sequence
  Synthetic Polypeptide
MDEFEMIKRNTSEIISEEELREVLKKDEKSATIGFEPSGKIHLGHYLQIKKMIDLQNAGFDIIILLADLHAYLNQKGELDEIRKIGDYNKKVFEAMGLKAKYVYGSEFQLDKDYTLNVYRLALKTTLKRARRSMELIAREDENPKVAEVIYPIMQVNDIHYAGVDVAVGGMEQRKIHMLARELLPKKVVCIHNPVLTGLDGEGKMSSSKGNFIAVDDSPEEIRAKIKKAYCPAGVVEGNPIMEIAKYFLEYPLTIKRPEKFGGDLTVNSYEELESLFKNKELHPMDLKNAVAEELIKILEPIRKRL

SEQ ID NO: 350 - protein, 306 aa, Artificial Sequence
  Synthetic Polypeptide
MDEFEMIKRNTSEIISEEELREVLKKDEKSATIGFEPSGKIHLGHYLQIKKMIDLQNAGFDIIILLSDLPAYLNQKGELDEIRKIGDYNKKVFEAMGLKAKYVYGSEFQLDKDYTLNVYRLALKTTLKRARRSMELIAREDENPKVAEVIYPIMQVNDIHYLGVDVAVGGMEQRKIHMLARELLPKKVVCIHNPVLTGLDGEGKMSSSKGNFIAVDDSPEEIRAKIKKAYCPAGVVEGNPIMEIAKYFLEYPLTIKRPEKFGGDLTVNSYEELESLFKNKELHPMDLKNAVAEELIKILEPIRKRL

SEQ ID NO: 351 - protein, 306 aa, Artificial Sequence
  Synthetic Polypeptide
MDEFEMIKRNTSEIISEEELREVLKKDEKSATIGFEPSGKIHLGHYLQIKKMIDLQNAGFDIIILLADLHAYLNQKGELDEIRKIGDYNKKVFEAMGLKAKYVYGSMFQLDKDYTLNVYRLALKTTLKRARRSMELIAREDENPKVAEVIYPIMQVNSSHYDGVDVAVGGMEQRKIHMLARELLPKKVVCIHNPVLTGLDGEGKMSSSKGNFIAVDDSPEEIRAKIKKAYCPAGVVEGNPIMEIAKYFLEYPLTIKRPEKFGGDLTVNSYEELESLFKNKELHPMDLKNAVAEELIKILEPIRKRL

SEQ ID NO: 352 - protein, 306 aa, Artificial Sequence
  Synthetic Polypeptide
MDEFEMIKRNTSEIISEEELREVLKKDEKSAQIGFEPSGKIHLGHYLQIKKMIDLQNAGFDIIILLPDLHAYLNQKGELDEIRKIGDYNKKVFEAMGLKAKYVYGSEFQLDKDYTLNVYRLALKTTLKRARRSMELIAREDENPKVAEVIYPIMQVNDIHYLGVDVDVGGMEQRKIHMLARELLPKKVVCIHNPVLTGLDGEGKMSSSKGNFIAVDDSPEEIRAKIKKAYCPAGVVEGNPIMEIAKYFLEYPLTIKRPEKFGGDLTVNSYEELESLFKNKELHPMDLKNAVAEELIKILEPIRKRL

SEQ ID NO: 353 - protein, 306 aa, Artificial Sequence
  Synthetic Polypeptide
MDEFEMIKRNTSEIISEEELREVLKKDEKSAHIGFEPSGKIHLGHYLQIKKMIDLQNAGFDIIILLADLHAYLNQKGELDEIRKIGDYNKKVFEAMGLKAKYVYGSAFQLDKDYTLNVYRLALKTTLKRARRSMELIAREDENPKVAEVIYPIMQVNGHHYIGVDVAVGGMEQRKIHMLARELLPKKVVCIHNPVLTGLDGEGKMSSSKGNFIAVDDSPEEIRAKIKKAYCPAGVVEGNPIMEIAKYFLEYPLTIKRPEKFGGDLTVNSYEELESLFKNKELHPMDLKNAVAEELIKILEPIRKRL

SEQ ID NO: 354 - protein, 306 aa, Artificial Sequence
  Synthetic Polypeptide
MDEFEMIKRNTSEIISEEELREVLKKDEKSAYIGFEPSGKIHLGHYLQIKKMIDLQNAGFDIIILLADLHAYLNQKGELDEIRKIGDYNKKVFEAMGLKAKYVYGSAFQLDKDYTLNVYRLALKTTLKRARRSMELIAREDENPKVAEVIYPIMQVNCAHYLGVDVAVGGMEQRKIHMLARELLPKKVVCIHNPVLTGLDGEGKMSSSKGNFIAVDDSPEEIRAKIKKAYCPAGVVEGNPIMEIAKYFLEYPLTIKRPEKFGGDLTVNSYEELESLFKNKELHPMDLKNAVAEELIKILEPIRKRL

SEQ ID NO: 355 - protein, 306 aa, Artificial Sequence
  Synthetic Polypeptide
MDEFEMIKRNTSEIISEEELREVLKKDEKSAGIGFEPSGKIHLGHYLQIKKMIDLQNAGFDIIILLADLHAYLNQKGELDEIRKIGDYNKKVFEAMGLKAKYVYGSSFQLDKDYTLNVYRLALKTTLKRARRSMELIAREDENPKVAEVIYPIMQVNTSHYLGVDVAVGGMEQRKIHMLARELLPKKVVCIHNPVLTGLDGEGKMSSSKGNFIAVDDSPEEIRAKIKKAYCPAGVVEGNPIMEIAKYFLEYPLTIKRPEKFGGDLTVNSYEELESLFKNKELHPMDLKNAVAEELIKILEPIRKRL

SEQ ID NO: 356 - protein, 306 aa, Artificial Sequence
  Synthetic Polypeptide
MDEFEMIKRNTSEIISEEELREVLKKDEKSATIGFEPSGKIHLGHYLQIKKMIDLQNAGFDIIILLADLHAYLNQKGELDEIRKIGDYNKKVFEAMGLKAKYVYGSNFQLDKDYTLNVYRLALKTTLKRARRSMELIAREDENPKVAEVIYPIMQVNPLHYQGVDVAVGGMEQRKIHMLARELLPKKVVCIHNPVLTGLDGEGKMSSSKGNFIAVDDSPEEIRAKIKKAYCPAGVVEGNPIMEIAKYFLEYPLTIKRPEKFGGDLTVNSYEELESLFKNKELHPMDLKNAVAEELIKILEPIRKRL

SEQ ID NO: 357 - protein, 306 aa, Artificial Sequence
  Synthetic Polypeptide
MDEFEMIKRNTSEIISEEELREVLKKDEKSATIGFEPSGKIHLGHYLQIKKMIDLQNAGFDIIILLADLHAYLNQKGELDEIRKIGDYNKKVFEAMGLKAKYVYGSSFQLDKDYTLNVYRLALKTTLKRARRSMELIAREDENPKVAEVIYPIMQVNPLHYQGVDVAVGGMEQRKIHMLARELLPKKVVCIHNPVLTGLDGEGKMSSSKGNFIAVDDSPEEIRAKIKKAYCPAGVVEGNPIMEIAKYFLEYPLTIKRPEKFGGDLTVNSYEELESLFKNKELHPMDLKNAVAEELIKILEPIRKRL

SEQ ID NO: 358 - protein, 306 aa, Artificial Sequence
  Synthetic Polypeptide
MDEFEMIKRNTSEIISEEELREVLKKDEKSALIGFEPSGKIHLGHYLQIKKMIDLQNAGFDIIILLADLHAYLNQKGELDEIRKIGDYNKKVFEAMGLKAKYVYGSTFQLDKDYTLNVYRLALKTTLKRARRSMELIAREDENPKVAEVIYPIMQVNPVHYQGVDVAVGGMEQRKIHMLARELLPKKVVCIHNPVLTGLDGEGKMSSSKGNFIAVDDSPEEIRAKIKKAYCPAGVVEGNPIMEIAKYFLEYPLTIKRPEKFGGDLTVNSYEELESLFKNKELHPMDLKNAVAEELIKILEPIRKRL

SEQ ID NO: 359 - protein, 306 aa, Artificial Sequence
  Synthetic Polypeptide
MDEFEMIKRNTSEIISEEELREVLKKDEKSATIGFEPSGKIHLGHYLQIKKMIDLQNAGFDIIILLADLHAYLNQKGELDEIRKIGDYNKKVFEAMGLKAKYVYGSSFQLDKDYTLNVYRLALKTTLKRARRSMELIAREDENPKVAEVIYPIMQVNPSHYQGVDVAVGGMEQRKIHMLARELLPKKVVCIHNPVLTGLDGEGKMSSSKGNFIAVDDSPEEIRAKIKKAYCPAGVVEGNPIMEIAKYFLEYPLTIKRPEKFGGDLTVNSYEELESLFKNKELHPMDLKNAVAEELIKILEPIRKRL

SEQ ID NO: 360 - protein, 932 aa, Artificial Sequence
  Synthetic Polypeptide
MSDFRIIEEKWQKAWEKDRIFESDPNEKEKFFLTIPYPYLNGNLHAGHTRTFTIGDAFARYMRMKGYNVLFPLGFHVTGTPIIGLAELIAKRDERTIEVYTKYHDVPLEDLLQLTTPEKIVEYFSREALQALKSIGYSIDWRRVFTTTDEEYQRFIEWQYWKLKELGLIVKGTHPVRYCPHDQNPVEDHDLLAGEEATIVEFTVIKFRLEDGDLIFPCATLRPETVFGVTNIWVKPTTYVIAEVDGEKWFVSKEAYEKLTYTEKKVRLLEEVDASQFFGKYVIVPLVNRKVPILPAEFVDTDNATGVVMSVPAHAPFDLAAIEDLKRDEETLAKYGIDKSVVESIKPIVLIKTDIEGVPAEKLIRELGVKSQKDKELLDKATKTLYKKEYHTGIMLDNTMNYAGMKVSEAKERVHEDLVKLGLGDVFYEFSEKPVICRCGTKCVVKVVRDQWFLNYSNREWKEKVLNHLEKMRIIPDYYKEEFRNKIEWLRDKACARRKGLGTRIPWDKEWLIESLSDSTIYMAYYILAKYINAGLLKAENMTPEFLDYVLLGKGEVGKVAEASKLSVELIQQIRDDFEYWYPVDLRSSGKDLVANHLLFYLFHHVAIFPPDKWPRAIAVNGYVSLEGKKMSKSKGPLLTMKRAVQQYGADVTRLYILHAAEYDSDADWKSREVEGLANHLRRFYNLVKENYLKEVGELTTLDRWLVSRMQRAIKEVREAMDNLQTRRAVNAAFFELMNDVRWYLRRGGENLAIILDDWIKLLAPFAPHICEELWHLKHDSYVSLESYPEYDETRVDEEAERIEEYLRNLVEDIQEIKKFVSDAKEVYIAPAEDWKVKAAKVVAESGDVGEAMKQLMQDEELRKLGKEVSNFVKKIFKDRKKLMLVKEWEVLQQNLKFIENETGLKVILDTQRVPEEKRRQAVPGKPAIYVA

SEQ ID NO: 361 - protein, 937 aa, Artificial Sequence
  Synthetic Polypeptide
VDTERKWRDRWRDAGIFQADPDDREKIFLTVAYPYPSGAMHIGHGRTYTVPDVYARFKRMQGYNVLFPMAWHVTGAPVIGIARRIQRKDPWTLKIYREVHRVPEDELERFSDPEYIVEYFSREYRSVMEDMGYSIDWRREFKTTDPTYSRFIQWQIRRLRDLGLVRKGAHPVKYCPECENPVGDHDLLEGEGVAINQLTLLKFKLGDSYLVAATFRPETIYGATNLWLNPDEDYVRVETGGEEWIISRAAVDNLSHQKLDLKVSGDVNPGDLIGMCVENPVTGQEHPILPASFVDPEYATGVVFSVPAHAPADFIALEDLRTDHELLERYGLEDVVADIEPVNVIAVDGYGEFPAAEVIEKFGVRNQEDPRLEDATGELYKIEHARGVMSSHIPVYGGMKVSEAREVIADELKDQGLADEMYEFAERPVICRCGGRCVVRVMEDQWFMKYSDDAWKDLAHRCLDGMKIIPEEVRANFEYYIDWLNDWACSRRIGLGTRLPWDERWIIEPLTDSTIYMAYYTIAHRLREMDAGEMDDEFFDAIFLDDSGTFEDLREEFRYWYPLDWRLSAKDLIGNHLTFHIFHHSAIFPESGWPRGAVVFGMGLLEGNKMSSSKGNVILLRDAIEKHGADVVRLFLMSSAEPWQDFDWRESEVIGTRRRIEWFREFGERVSGILDGRPVLSEVTPAEPESFIGRWNMGQLNQRIREATRALESFQTRKAVQEALYLLKKDVDHYLKRVEGRVDDEVKSVLANVLHAWIRLMAPFIPYTAEEMNERYGGEGFVAEAPWPDFSDDAESRDVQVAEEMVQNTVRDIQEIMKILGSTPERVHIYTSPKWRWDVLRVAAEVGKLDMGSIMGRVSAEGIHDNMKEVAEFVRRIIRDLGRSEVTVIDEYSVLMDASDYIESEVGARVVIHSKPDYDPENKAVNAVPLKPAIYLE

SEQ ID NO: 362 - protein, 4 aa, Artificial Sequence
  Synthetic Polypeptide
GGGS

SEQ ID NO: 363 - protein, 5 aa, Artificial Sequence
  Synthetic Polypeptide
GGGGS

SEQ ID NO: 364 - protein, 5 aa, Artificial Sequence
  Synthetic Polypeptide
EAAAK

SEQ ID NO: 365 - protein, 16 aa, Artificial Sequence
  Synthetic Polypeptide
SGSETPGTSESATPES

SEQ ID NO: 366 - RNA, 82 nt, Artificial Sequence
  Synthetic Poly
guuuuagagcuagaaauagcaaguuaaaauaaaggcuaguccguuaucaacuugaaaaaguggcaccgagucggugcuuuuu

SEQ ID NO: 367 - DNA, 20 bp, Artificial Sequence
  Synthetic Polynucleotide
gaatgctcaggaatgtatcc

SEQ ID NO: 368 - DNA, 21 bp, Artificial Sequence
  Synthetic Polynucleotide
gatagtccaggcaaaaggaag

SEQ ID NO: 369 - DNA, 20 bp, Artificial Sequence
  Synthetic Polynucleotide
accagcagagggagttggcc

SEQ ID NO: 370 - DNA, 20 bp, Artificial Sequence
  Synthetic Polynucleotide
gggagcaggagcgaagacgc

SEQ ID NO: 371 - DNA, 20 bp, Artificial Sequence
  Synthetic Polynucleotide
gaatgaacagttcatcaatg

SEQ ID NO: 372 - DNA, 21 bp, Artificial Sequence
  Synthetic Polynucleotide
gtcctgccagggtgattctgg

SEQ ID NO: 373 - DNA, 21 bp, Artificial Sequence
  Synthetic Polynucleotide
gtgtgcccagaagaacaggcc

SEQ ID NO: 374 - DNA, 4089 bp, Artificial Sequence
  Synthetic Polynucleotide
atgtctgcggagagcggccctgggacgagattgagaaatctgccagtaatgggggatggactagaaacttcccaaatgtctacaacacaggcccaggcccaaccccagccagccaacgcagccagcaccaaccccccgcccccagagacctccaaccctaacaagcccaagaggcagaccaaccaactgcaatacctgctcagagtggtgctcaagacactatggaaacaccagtttgcatggcctttccagcagcctgtggatgccgtcaagctgaacctccctgattactataagatcattaaaacgcctatggatatgggaacaataaagaagcgcttggaaaacaactattactggaatgctcaggaatgtatccaggacttcaacactatgtttacaaattgttacatctacaacaagcctggagatgacatagtcttaatggcagaagctctggaaaagctcttcttgcaaaaaataaatgagctacccacagaagaaaccgagatcatgatagtccaggcaaaaggaagaggacgtgggaggaaagaaacagggacagcaaaacctggcgtttccacggtaccaaacacaactcaagcatcgactcctccgcagacccagacccctcagccgaatcctcctcctgtgcaggccacgcctcaccccttccctgccgtcaccccggacctcatcgtccagacccctgtcatgacagtggtgcctccccagccactgcagacgcccccgccagtgcccccccagccacaacccccacccgctccagctccccagcccgtacagagccacccacccatcatcgcggccaccccacagcctgtgaagacaaagaagggagtgaagaggaaagcagacaccaccacccccaccaccattgaccccattcacgagccaccctcgctgcccccggagcccaagaccaccaagctgggccagcggcgggagagcagccggcctgtgaaacctccaaagaaggacgtgcccgactctcagcagcacccagcaccagagaagagcagcaaggtctcggagcagctcaagtgctgcagcggcatcctcaaggagatgtttgccaagaagcacgccgcctacgcctggcccttctacaagcctgtggacgtggaggcactgggcctacacgactactgtgacatcatcaagcaccccatggacatgagcacaatcaagtctaaactggaggcccgtgagtaccgtgatgctcaggagtttggtgctgacgtccgattgatgttctccaactgctataagtacaaccctcctgaccatgaggtggtggccatggcccgcaagctccaggatgtgttcgaaatgcgctttgccaagatgccggacgagcctgaggagccagtggtggccgtgtcctccccggcagtgccccctcccaccaaggttgtggccccgccctcatccagcgacagcagcagcgatagctcctcggacagtgacagttcgactgatgactctgaggaggagcgagcccagcggctggctgagctccaggagcagctcaaagccgtgcacgagcagcttgcagccctctctcagccccagcagaacaaaccaaagaaaaaggagaaagacaagaaggaaaagaaaaaagaaaagcacaaaaggaaagaggaagtggaagagaataaaaaaagcaaagccaaggaacctcctcctaaaaagacgaagaaaaataatagcagcaacagcaatgtgagcaagaaggagccagcgcccatgaagagcaagccccctcccacgtatgagtcggaggaagaggacaagtgcaagcctatgtcctatgaggagaagcggcagctcagcttggacatcaacaagctccccggcgagaagctgggccgcgtggtgcacatcatccagtcacgggagccctccctgaagaattccaaccccgacgagattgaaatcgactttgagaccctgaagccgtccacactgcgtgagctggagcgctatgtcacctcctgtttgcggaagaaaaggaaacctcaagctgagaaagttgatgtgattgccggctcctccaagatgaagggcttctcgtcctcagagtcggagagctccagtgagtccagctcctctgacagcgaagactccgaaacagagatggctccgaagtcaaaaaagaaggggcaccccgggagggagcagaagaagcaccatcatcaccaccatcagcagatgcagcaggccccggctcctgtgccccagcagccgcccccgcctccccagcagcccccaccgcctccacctccgcagcagcaacagcagccgccacccccgcctcccccaccctccatgccgcagcaggcagccccggcgatgaagtcctcgcccccacccttcattgccacccaggtgcccgtcctggagccccagctcccaggcagcgtctttgaccccatcggccacttcacccagcccatcctgcacctgccgcagcctgagctgccccctcacctgccccagccgcctgagcacagcactccaccccatctcaaccagcacgcagtggtctctcctccagctttgcacaacgcactaccccagcagccatcacggcccagcaaccgagccgctgccctgcctcccaagcccgcccggcccccagccgtgtcaccagccttgacccaaacacccctgctcccacagccccccatggcccaacccccccaagtgctgctggaggatgaagagccacctgccccacccctcacctccatgcagatgcagctgtacctgcagcagctgcagaaggtgcagccccctacgccgctactcccttccgtgaaggtgcagtcccagcccccaccccccctgccgcccccaccccacccctctgtgcagcagcagctgcagcagcagccgccaccacccccaccaccccagccccagcctccaccccagcagcagcatcagccccctccacggcccgtgcacttgcagcccatgcagttttccacccacatccaacagcccccgccaccccagggccagcagcccccccatccgcccccaggccagcagccacccccgccgcagcctgccaagcctcagcaagtcatccagcaccaccattcaccccggcaccacaagtcggacccctactcaaccggtcacctccgcgaagccccctccccgcttatgatacattccccccagatgtcacagttccagagcctgacccaccagtctccaccccagcaaaacgtccagcctaagaaacaggagctgcgtgctgcctccgtggtccagccccagcccctcgtggtggtgaaggaggagaagatccactcacccatcatccgcagcgagcccttcagcccctcgctgcggccggagccccccaagcacccggagagcatcaaggcccccgtccacctgccccagcggccggaaatgaagcctgtggatgtcgggaggcctgtgatccggcccccagagcagaacgcaccgccaccaggggcccctgacaaggacaaacagaaacaggagccgaagactccagttgcgcccaaaaaggacctgaaaatcaagaacatgggctcctgggccagcctagtgcagaagcatccgaccaccccctcctccacagccaagtcatccagcgacagcttcgagcagttccgccgcgccgctcgggagaaagaggagcgtgagaaggccctgaaggctcaggccgagcacgctgagaaggagaaggagcggctgcggcaggagcgcatgaggagccgagaggacgaggatgcgctggagcaggcccggcgggcccatgaggaggcacgtcggcgccaggagcagcagcagcagcagcgccaggagcaacagcagcagcagcaacagcaagcagctgcggtggctgccgccgccaccccacaggcccagagctcccagccccagtccatgctggaccagcagagggagttggcccggaagcgggagcaggagcgaagacgccgggaagccatggcagctaccattgacatgaatttccagagtgatctattgtcaatatttgaagaaaatcttttctga

SEQ ID NO: 375 - protein, 1362 aa, Artificial Sequence
  Synthetic Polypeptide
MSAESGPGTRLRNLPVMGDGLETSQMSTTQAQAQPQPANAASTNPPPPETSNPNKPKRQTNQLQYLLRVVLKTLWKHQFAWPFQQPVDAVKLNLPDYYKIIKTPMDMGTIKKRLENNYYWNAQECIQDFNTMFTNCYIYNKPGDDIVLMAEALEKLFLQKINELPTEETEIMIVQAKGRGRGRKETGTAKPGVSTVPNTTQASTPPQTQTPQPNPPPVQATPHPFPAVTPDLIVQTPVMTVVPPQPLQTPPPVPPQPQPPPAPAPQPVQSHPPIIAATPQPVKTKKGVKRKADTTTPTTIDPIHEPPSLPPEPKTTKLGQRRESSRPVKPPKKDVPDSQQHPAPEKSSKVSEQLKCCSGILKEMFAKKHAAYAWPFYKPVDVEALGLHDYCDIIKHPMDMSTIKSKLEAREYRDAQEFGADVRLMFSNCYKYNPPDHEVVAMARKLQDVFEMRFAKMPDEPEEPVVAVSSPAVPPPTKVVAPPSSSDSSSDSSSDSDSSTDDSEEERAQRLAELQEQLKAVHEQLAALSQPQQNKPKKKEKDKKEKKKEKHKRKEEVEENKKSKAKEPPPKKTKKNNSSNSNVSKKEPAPMKSKPPPTYESEEEDKCKPMSYEEKRQLSLDINKLPGEKLGRVVHIIQSREPSLKNSNPDEIEIDFETLKPSTLRELERYVTSCLRKKRKPQAEKVDVIAGSSKMKGFSSSESESSSESSSSDSEDSETEMAPKSKKKGHPGREQKKHHHHHHQQMQQAPAPVPQQPPPPPQQPPPPPPPQQQQQPPPPPPPPSMPQQAAPAMKSSPPPFIATQVPVLEPQLPGSVFDPIGHFTQPILHLPQPELPPHLPQPPEHSTPPHLNQHAVVSPPALHNALPQQPSRPSNRAAALPPKPARPPAVSPALTQTPLLPQPPMAQPPQVLLEDEEPPAPPLTSMQMQLYLQQLQKVQPPTPLLPSVKVQSQPPPPLPPPPHPSVQQQLQQQPPPPPPPQPQPPPQQQHQPPPRPVHLQPMQFSTHIQQPPPPQGQQPPHPPPGQQPPPPQPAKPQQVIQHHHSPRHHKSDPYSTGHLREAPSPLMIHSPQMSQFQSLTHQSPPQQNVQPKKQELRAASVVQPQPLVVVKEEKIHSPIIRSEPFSPSLRPEPPKHPESIKAPVHLPQRPEMKPVDVGRPVIRPPEQNAPPPGAPDKDKQKQEPKTPVAPKKDLKIKNMGSWASLVQKHPTTPSSTAKSSSDSFEQFRRAAREKEEREKALKAQAEHAEKEKERLRQERMRSREDEDALEQARRAHEEARRRQEQQQQQRQEQQQQQQQQAAAVAAAATPQAQSSQPQSMLDQQRELARKREQERRRREAMAATIDMNFQSDLLSIFEENLF

SEQ ID NO: 376 - DNA, 804 bp, Artificial Sequence
  Synthetic Polynucleotide
atgaatctacttctgatccttacctttgttgcagctgctgttgctgccccctttgatgatgatgacaagatcgttgggggctacatctgtgaggagaattctgtcccctaccaggtgtccttgaattctggctaccacttctgcggtggctccctcatcagcgaacagtgggtggtgtcagcaggtcactgctacaagtcggcaattaactcaaaattatcaggaagagggtgtgaatatcaccgcatccaggtgagactgggagagcacaacatcgaagtcctggaggggaatgaatagttcatcaatgcggccaagatcatccgccaccccaaatacaacagccggactctggacaatgacatcctgctgatcaagctctcctcacctgccgtcatcaattcccgcgtgtccgccatctctctgcccactgcccctccagctgctggcaccgagtccctcatctccggctggggcaacactctgagttctggtgccgactacccagacgagctgcagtgcctggatgctcctgtgctgagccaggctgagtgtgaagcctcctaccctggaaagattaccaacaacatgttctgtgtgggcttcctcgagggaggcaaggattcctgccagggtgattctggtggccctgtggtctccaatggagagctccaaggaattgtctcctggggctatggctgtgcccagaagaacaggcctggagtctacaccaaggtctacaactatgtggactggattaaggacaccatagctgccaacagccatcaccaccaccatcactaa

SEQ ID NO: 377 - protein, 261 aa, Artificial Sequence
  Synthetic Polypeptide
MNLLLILTFVAAAVAAPFDDDDKIVGGYICEENSVPYQVSLNSGYHFCGGSLISEQWVVSAGHCYKSAINSKLSGRGCEYHRIQVRLGEHNIEVLEGNEQFINAAKIIRHPKYNSRTLDNDILLIKLSSPAVINSRVSAISLPTAPPAAGTESLISGWGNTLSSGADYPDELQCLDAPVLSQAECEASYPGKITNNMFCVGFLEGGKDSCQGDSGGPVVSNGELQGIVSWGYGCAQKNRPGVYTKVYNYVDWIKDTIAANS

SEQ ID NO: 378 - protein, 208 aa, Petromyzon marinus
MTDAEYVRIHEKLDIYTFKKQFFNNKKSVSHRCYVLFELKRRGERRACFWGYAVNKPQSGTERGIHAEIFSIRKVEEYLRDNPGQFTINWYSSWSPCADCAEKILEWYNQELRGNGHTLKIWACKLYYEKNARNQIGLWNLRDNGVGLNVMVSEHYQCCRKIFIQSSHNQLNENRWLEKTLKRAEKRRSELSIMIQVKILHTTKSPAV

SEQ ID NO: 379 - protein, 384 aa, Homo sapiens
MKPHFRNTVERMYRDTFSYNFYNRPILSRRNTVWLCYEVKTKGPSRPPLDAKIFRGQVYSELKYHPEMRFFHWFSKWRKLHRDQEYEVTWYISWSPCTKCTRDMATFLAEDPKVTLTIFVARLYYFWDPDYQEALRSLCQKRDGPRATMKIMNYDEFQHCWSKFVYSQRELFEPWNNLPKYYILLHIMLGEILRHSMDPPTFTFNFNNEPWVRGRHETYLCYEVERMHNDTWVLLNQRRGFLCNQAPHKHGFLEGRHAELCFLDVIPFWKLDLDQDYRVTCFTSWSPCFSCAQEMAKFISKNKHVSLCIFTARIYRRQGRCQEGLRTLAEAGAKISIMTYSEFKHCWDTFVDHQGCPFQPWDGLDEHSQDLSGRLRAILQNQEN

SEQ ID NO: 380 - protein, 184 aa, Homo sapiens
MDPPTFTFNFNNEPWVRGRHETYLCYEVERMHNDTWVLLNQRRGFLCNQAPHKHGFLEGRHAELCFLDVIPFWKLDLDQDYRVTCFTSWSPCFSCAQEMAKFISKNKHVSLCIFTARIYDDQGRCQEGLRTLAEAGAKISIMTYSEFKHCWDTFVDHQGCPFQPWDGLDEHSQDLSGRLRAILQ

SEQ ID NO: 381 - protein, 184 aa, Homo sapiens
MDPPTFTFNFNNEPWVRGRHETYLCYEVERMHNDTWVLLNQRRGFLCNQAPHKHGFLEGRHAELCFLDVIPFWKLDLDQDYRVTCFTSWSPCFSCAQEMAKFISKNKHVSLCIFTARIYRRQGRCQEGLRTLAEAGAKISIMTYSEFKHCWDTFVDHQGCPFQPWDGLDEHSQDLSGRLRAILQ

SEQ ID NO: 382 - protein, 1679 aa, Artificial Sequence
  Synthetic Polypeptide
MTDAEYVRIHEKLDIYTFKKQFFNNKKSVSHRCYVLFELKRRGERRACFWGYAVNKPQSGTERGIHAEIFSIRKVEEYLRDNPGQFTINWYSSWSPCADCAEKILEWYNQELRGNGHTLKIWACKLYYEKNARNQIGLWNLRDNGVGLNVMVSEHYQCCRKIFIQSSHNQLNENRWLEKTLKRAEKRRSELSIMIQVKILHTTKSPAVSGSETPGTSESATPESDKKYSIGLAIGTNSVGWAVITDEYKVPSKKFKVLGNTDRHSIKKNLIGALLFDSGETAEATRLKRTARRRYTRRKNRICYLQEIFSNEMAKVDDSFFHRLEESFLVEEDKKHERHPIFGNIVDEVAYHEKYPTIYHLRKKLVDSTDKADLRLIYLALAHMIKFRGHFLIEGDLNPDNSDVDKLFIQLVQTYNQLFEENPINASGVDAKAILSARLSKSRRLENLIAQLPGEKKNGLFGNLIALSLGLTPNFKSNFDLAEDAKLQLSKDTYDDDLDNLLAQIGDQYADLFLAAKNLSDAILLSDILRVNTEITKAPLSASMIKRYDEHHQDLTLLKALVRQQLPEKYKEIFFDQSKNGYAGYIDGGASQEEFYKFIKPILEKMDGTEELLVKLNREDLLRKQRTFDNGSIPHQIHLGELHAILRRQEDFYPFLKDNREKIEKILTFRIPYYVGPLARGNSRFAWMTRKSEETITPWNFEEVVDKGASAQSFIERMTNFDKNLPNEKVLPKHSLLYEYFTVYNELTKVKYVTEGMRKPAFLSGEQKKAIVDLLFKTNRKVTVKQLKEDYFKKIECFDSVEISGVEDRFNASLGTYHDLLKIIKDKDFLDNEENEDILEDIVLTLTLFEDREMIEERLKTYAHLFDDKVMKQLKRRRYTGWGRLSRKLINGIRDKQSGKTILDFLKSDGFANRNFMQLIHDDSLTFKEDIQKAQVSGQGDSLHEHIANLAGSPAIKKGILQTVKVVDELVKVMGRHKPENIVIEMARENQTTQKGQKNSRERMKRIEEGIKELGSQILKEHPVENTQLQNEKLYLYYLQNGRDMYVDQELDINRLSDYDVDAIVPQSFLKDDSIDNKVLTRSDKNRGKSDNVPSEEVVKKMKNYWRQLLNAKLITQRKFDNLTKAERGGLSELDKAGFIKRQLVETRQITKHVAQILDSRMNTKYDENDKLIREVKVITLKSKLVSDFRKDFQFYKVREINNYHHAHDAYLNAVVGTALIKKYPKLESEFVYGDYKVYDVRKMIAKSEQEIGKATAKYFFYSNIMNFFKTEITLANGEIRKRPLIETNGETGEIVWDKGRDFATVRKVLSMPQVNIVKKTEVQTGGFSKESILPKRNSDKLIARKKDWDPKKYGGFDSPTVAYSVLVVAKVEKGKSKKLKSVKELLGITIMERSSFEKNPIDFLEAKGYKEVKKDLIIKLPKYSLFELENGRKRMLASAGELQKGNELALPSKYVNFLYLASHYEKLKGSPEDNEQKQLFVEQHKHYLDEIIEQISEFSKRVILADANLDKVLSAYNKHRDKPIREQAENIIHLFTLTNLGAPAAFKYFDTTIDRKRYTSTKEVLDATLIHQSITGLYETRIDLSQLGGDSGGSMTNLSDIIEKETGKQLVIQESILMLPEEVEEVIGNKPESDILVHTAYDESTDENVMLLTSDAPEYKPWALVIQDSNGENKIKML

SEQ ID NO: 383 - protein, 1689 aa, Artificial Sequence
  Synthetic Polypeptide
MTDAEYVRIHEKLDIYTFKKQFFNNKKSVSHRCYVLFELKRRGERRACFWGYAVNKPQSGTERGIHAEIFSIRKVEEYLRDNPGQFTINWYSSWSPCADCAEKILEWYNQELRGNGHTLKIWACKLYYEKNARNQIGLWNLRDNGVGLNVMVSEHYQCCRKIFIQSSHNQLNENRWLEKTLKRAEKRRSELSIMIQVKILHTTKSPAVSGSETPGTSESATPESDKKYSIGLAIGTNSVGWAVITDEYKVPSKKFKVLGNTDRHSIKKNLIGALLFDSGETAEATRLKRTARRRYTRRKNRICYLQEIFSNEMAKVDDSFFHRLEESFLVEEDKKHERHPIFGNIVDEVAYHEKYPTIYHLRKKLVDSTDKADLRLIYLALAHMIKFRGHFLIEGDLNPDNSDVDKLFIQLVQTYNQLFEENPINASGVDAKAILSARLSKSRRLENLIAQLPGEKKNGLFGNLIALSLGLTPNFKSNFDLAEDAKLQLSKDTYDDDLDNLLAQIGDQYADLFLAAKNLSDAILLSDILRVNTEITKAPLSASMIKRYDEHHQDLTLLKALVRQQLPEKYKEIFFDQSKNGYAGYIDGGASQEEFYKFIKPILEKMDGTEELLVKLNREDLLRKQRTFDNGSIPHQIHLGELHAILRRQEDFYPFLKDNREKIEKILTFRIPYYVGPLARGNSRFAWMTRKSEETITPWNFEEVVDKGASAQSFIERMTNFDKNLPNEKVLPKHSLLYEYFTVYNELTKVKYVTEGMRKPAFLSGEQKKAIVDLLFKTNRKVTVKQLKEDYFKKIECFDSVEISGVEDRFNASLGTYHDLLKIIKDKDFLDNEENEDILEDIVLTLTLFEDREMIEERLKTYAHLFDDKVMKQLKRRRYTGWGRLSRKLINGIRDKQSGKTILDFLKSDGFANRNFMQLIHDDSLTFKEDIQKAQVSGQGDSLHEHIANLAGSPAIKKGILQTVKVVDELVKVMGRHKPENIVIEMARENQTTQKGQKNSRERMKRIEEGIKELGSQILKEHPVENTQLQNEKLYLYYLQNGRDMYVDQELDINRLSDYDVDHIVPQSFLKDDSIDNKVLTRSDKNRGKSDNVPSEEVVKKMKNYWRQLLNAKLITQRKFDNLTKAERGGLSELDKAGFIKRQLVETRQITKHVAQILDSRMNTKYDENDKLIREVKVITLKSKLVSDFRKDFQFYKVREINNYHHAHDAYLNAVVGTALIKKYPKLESEFVYGDYKVYDVRKMIAKSEQEIGKATAKYFFYSNIMNFFKTEITLANGEIRKRPLIETNGETGEIVWDKGRDFATVRKVLSMPQVNIVKKTEVQTGGFSKESILPKRNSDKLIARKKDWDPKKYGGFDSPTVAYSVLVVAKVEKGKSKKLKSVKELLGITIMERSSFEKNPIDFLEAKGYKEVKKDLIIKLPKYSLFELENGRKRMLASAGELQKGNELALPSKYVNFLYLASHYEKLKGSPEDNEQKQLFVEQHKHYLDEIIEQISEFSKRVILADANLDKVLSAYNKHRDKPIREQAENIIHLFTLTNLGAPAAFKYFDTTIDRKRYTSTKEVLDATLIHQSITGLYETRIDLSQLGGDSGGSTNLSDIIEKETGKQLVIQESILMLPEEVEEVIGNKPESDILVHTAYDESTDENVMLLTSDAPEYKPWALVIQDSNGENKIKMLSGGSPKKKRKV

SEQ ID NO: 384 - protein, 1655 aa, Artificial Sequence
  Synthetic Polypeptide
MDPPTFTFNFNNEPWVRGRHETYLCYEVERMHNDTWVLLNQRRGFLCNQAPHKHGFLEGRHAELCFLDVIPFWKLDLDQDYRVTCFTSWSPCFSCAQEMAKFISKNKHVSLCIFTARIYDDQGRCQEGLRTLAEAGAKISIMTYSEFKHCWDTFVDHQGCPFQPWDGLDEHSQDLSGRLRAILQSGSETPGTSESATPESDKKYSIGLAIGTNSVGWAVITDEYKVPSKKFKVLGNTDRHSIKKNLIGALLFDSGETAEATRLKRTARRRYTRRKNRICYLQEIFSNEMAKVDDSFFHRLEESFLVEEDKKHERHPIFGNIVDEVAYHEKYPTIYHLRKKLVDSTDKADLRLIYLALAHMIKFRGHFLIEGDLNPDNSDVDKLFIQLVQTYNQLFEENPINASGVDAKAILSARLSKSRRLENLIAQLPGEKKNGLFGNLIALSLGLTPNFKSNFDLAEDAKLQLSKDTYDDDLDNLLAQIGDQYADLFLAAKNLSDAILLSDILRVNTEITKAPLSASMIKRYDEHHQDLTLLKALVRQQLPEKYKEIFFDQSKNGYAGYIDGGASQEEFYKFIKPILEKMDGTEELLVKLNREDLLRKQRTFDNGSIPHQIHLGELHAILRRQEDFYPFLKDNREKIEKILTFRIPYYVGPLARGNSRFAWMTRKSEETITPWNFEEVVDKGASAQSFIERMTNFDKNLPNEKVLPKHSLLYEYFTVYNELTKVKYVTEGMRKPAFLSGEQKKAIVDLLFKTNRKVTVKQLKEDYFKKIECFDSVEISGVEDRFNASLGTYHDLLKIIKDKDFLDNEENEDILEDIVLTLTLFEDREMIEERLKTYAHLFDDKVMKQLKRRRYTGWGRLSRKLINGIRDKQSGKTILDFLKSDGFANRNFMQLIHDDSLTFKEDIQKAQVSGQGDSLHEHIANLAGSPAIKKGILQTVKVVDELVKVMGRHKPENIVIEMARENQTTQKGQKNSRERMKRIEEGIKELGSQILKEHPVENTQLQNEKLYLYYLQNGRDMYVDQELDINRLSDYDVDAIVPQSFLKDDSIDNKVLTRSDKNRGKSDNVPSEEVVKKMKNYWRQLLNAKLITQRKFDNLTKAERGGLSELDKAGFIKRQLVETRQITKHVAQILDSRMNTKYDENDKLIREVKVITLKSKLVSDFRKDFQFYKVREINNYHHAHDAYLNAVVGTALIKKYPKLESEFVYGDYKVYDVRKMIAKSEQEIGKATAKYFFYSNIMNFFKTEITLANGEIRKRPLIETNGETGEIVWDKGRDFATVRKVLSMPQVNIVKKTEVQTGGFSKESILPKRNSDKLIARKKDWDPKKYGGFDSPTVAYSVLVVAKVEKGKSKKLKSVKELLGITIMERSSFEKNPIDFLEAKGYKEVKKDLIIKLPKYSLFELENGRKRMLASAGELQKGNELALPSKYVNFLYLASHYEKLKGSPEDNEQKQLFVEQHKHYLDEIIEQISEFSKRVILADANLDKVLSAYNKHRDKPIREQAENIIHLFTLTNLGAPAAFKYFDTTIDRKRYTSTKEVLDATLIHQSITGLYETRIDLSQLGGDSGGSMTNLSDIIEKETGKQLVIQESILMLPEEVEEVIGNKPESDILVHTAYDESTDENVMLLTSDAPEYKPWALVIQDSNGENKIKML

SEQ ID NO: 385 - protein, 1665 aa, Artificial Sequence
  Synthetic Polypeptide
MDPPTFTFNFNNEPWVRGRHETYLCYEVERMHNDTWVLLNQRRGFLCNQAPHKHGFLEGRHAELCFLDVIPFWKLDLDQDYRVTCFTSWSPCFSCAQEMAKFISKNKHVSLCIFTARIYDDQGRCQEGLRTLAEAGAKISIMTYSEFKHCWDTFVDHQGCPFQPWDGLDEHSQDLSGRLRAILQSGSETPGTSESATPESDKKYSIGLAIGTNSVGWAVITDEYKVPSKKFKVLGNTDRHSIKKNLIGALLFDSGETAEATRLKRTARRRYTRRKNRICYLQEIFSNEMAKVDDSFFHRLEESFLVEEDKKHERHPIFGNIVDEVAYHEKYPTIYHLRKKLVDSTDKADLRLIYLALAHMIKFRGHFLIEGDLNPDNSDVDKLFIQLVQTYNQLFEENPINASGVDAKAILSARLSKSRRLENLIAQLPGEKKNGLFGNLIALSLGLTPNFKSNFDLAEDAKLQLSKDTYDDDLDNLLAQIGDQYADLFLAAKNLSDAILLSDILRVNTEITKAPLSASMIKRYDEHHQDLTLLKALVRQQLPEKYKEIFFDQSKNGYAGYIDGGASQEEFYKFIKPILEKMDGTEELLVKLNREDLLRKQRTFDNGSIPHQIHLGELHAILRRQEDFYPFLKDNREKIEKILTFRIPYYVGPLARGNSRFAWMTRKSEETITPWNFEEVVDKGASAQSFIERMTNFDKNLPNEKVLPKHSLLYEYFTVYNELTKVKYVTEGMRKPAFLSGEQKKAIVDLLFKTNRKVTVKQLKEDYFKKIECFDSVEISGVEDRFNASLGTYHDLLKIIKDKDFLDNEENEDILEDIVLTLTLFEDREMIEERLKTYAHLFDDKVMKQLKRRRYTGWGRLSRKLINGIRDKQSGKTILDFLKSDGFANRNFMQLIHDDSLTFKEDIQKAQVSGQGDSLHEHIANLAGSPAIKKGILQTVKVVDELVKVMGRHKPENIVIEMARENQTTQKGQKNSRERMKRIEEGIKELGSQILKEHPVENTQLQNEKLYLYYLQNGRDMYVDQELDINRLSDYDVDHIVPQSFLKDDSIDNKVLTRSDKNRGKSDNVPSEEVVKKMKNYWRQLLNAKLITQRKFDNLTKAERGGLSELDKAGFIKRQLVETRQITKHVAQILDSRMNTKYDENDKLIREVKVITLKSKLVSDFRKDFQFYKVREINNYHHAHDAYLNAVVGTALIKKYPKLESEFVYGDYKVYDVRKMIAKSEQEIGKATAKYFFYSNIMNFFKTEITLANGEIRKRPLIETNGETGEIVWDKGRDFATVRKVLSMPQVNIVKKTEVQTGGFSKESILPKRNSDKLIARKKDWDPKKYGGFDSPTVAYSVLVVAKVEKGKSKKLKSVKELLGITIMERSSFEKNPIDFLEAKGYKEVKKDLIIKLPKYSLFELENGRKRMLASAGELQKGNELALPSKYVNFLYLASHYEKLKGSPEDNEQKQLFVEQHKHYLDEIIEQISEFSKRVILADANLDKVLSAYNKHRDKPIREQAENIIHLFTLTNLGAPAAFKYFDTTIDRKRYTSTKEVLDATLIHQSITGLYETRIDLSQLGGDSGGSTNLSDIIEKETGKQLVIQESILMLPEEVEEVIGNKPESDILVHTAYDESTDENVMLLTSDAPEYKPWALVIQDSNGENKIKMLSGGSPKKKRKV

SEQ ID NO: 386 - protein, 1665 aa, Artificial Sequence
  Synthetic Polypeptide
MDPPTFTFNFNNEPWVRGRHETYLCYEVERMHNDTWVLLNQRRGFLCNQAPHKHGFLEGRHAELCFLDVIPFWKLDLDQDYRVTCFTSWSPCFSCAQEMAKFISKNKHVSLCIFTARIYRRQGRCQEGLRTLAEAGAKISIMTYSEFKHCWDTFVDHQGCPFQPWDGLDEHSQDLSGRLRAILQSGSETPGTSESATPESDKKYSIGLAIGTNSVGWAVITDEYKVPSKKFKVLGNTDRHSIKKNLIGALLFDSGETAEATRLKRTARRRYTRRKNRICYLQEIFSNEMAKVDDSFFHRLEESFLVEEDKKHERHPIFGNIVDEVAYHEKYPTIYHLRKKLVDSTDKADLRLIYLALAHMIKFRGHFLIEGDLNPDNSDVDKLFIQLVQTYNQLFEENPINASGVDAKAILSARLSKSRRLENLIAQLPGEKKNGLFGNLIALSLGLTPNFKSNFDLAEDAKLQLSKDTYDDDLDNLLAQIGDQYADLFLAAKNLSDAILLSDILRVNTEITKAPLSASMIKRYDEHHQDLTLLKALVRQQLPEKYKEIFFDQSKNGYAGYIDGGASQEEFYKFIKPILEKMDGTEELLVKLNREDLLRKQRTFDNGSIPHQIHLGELHAILRRQEDFYPFLKDNREKIEKILTFRIPYYVGPLARGNSRFAWMTRKSEETITPWNFEEVVDKGASAQSFIERMTNFDKNLPNEKVLPKHSLLYEYFTVYNELTKVKYVTEGMRKPAFLSGEQKKAIVDLLFKTNRKVTVKQLKEDYFKKIECFDSVEISGVEDRFNASLGTYHDLLKIIKDKDFLDNEENEDILEDIVLTLTLFEDREMIEERLKTYAHLFDDKVMKQLKRRRYTGWGRLSRKLINGIRDKQSGKTILDFLKSDGFANRNFMQLIHDDSLTFKEDIQKAQVSGQGDSLHEHIANLAGSPAIKKGILQTVKVVDELVKVMGRHKPENIVIEMARENQTTQKGQKNSRERMKRIEEGIKELGSQILKEHPVENTQLQNEKLYLYYLQNGRDMYVDQELDINRLSDYDVDHIVPQSFLKDDSIDNKVLTRSDKNRGKSDNVPSEEVVKKMKNYWRQLLNAKLITQRKFDNLTKAERGGLSELDKAGFIKRQLVETRQITKHVAQILDSRMNTKYDENDKLIREVKVITLKSKLVSDFRKDFQFYKVREINNYHHAHDAYLNAVVGTALIKKYPKLESEFVYGDYKVYDVRKMIAKSEQEIGKATAKYFFYSNIMNFFKTEITLANGEIRKRPLIETNGETGEIVWDKGRDFATVRKVLSMPQVNIVKKTEVQTGGFSKESILPKRNSDKLIARKKDWDPKKYGGFDSPTVAYSVLVVAKVEKGKSKKLKSVKELLGITIMERSSFEKNPIDFLEAKGYKEVKKDLIIKLPKYSLFELENGRKRMLASAGELQKGNELALPSKYVNFLYLASHYEKLKGSPEDNEQKQLFVEQHKHYLDEIIEQISEFSKRVILADANLDKVLSAYNKHRDKPIREQAENIIHLFTLTNLGAPAAFKYFDTTIDRKRYTSTKEVLDATLIHQSITGLYETRIDLSQLGGDSGGSTNLSDIIEKETGKQLVIQESILMLPEEVEEVIGNKPESDILVHTAYDESTDENVMLLTSDAPEYKPWALVIQDSNGENKIKMLSGGSPKKKRKV

SEQ ID NO: 387 - protein, 15 aa, Artificial Sequence
  Synthetic Polypeptide
VPFLLEPDNINGKTC

SEQ ID NO: 388 - protein, 12 aa, Artificial Sequence
  Synthetic Polypeptide
GSAGSAAGSGEF

SEQ ID NO: 389 - protein, 12 aa, Artificial Sequence
  Synthetic Polypeptide
SIVAQLSRPDPA

SEQ ID NO: 390 - protein, 10 aa, Artificial Sequence
  Synthetic Polypeptide
MKIIEQLPSA

SEQ ID NO: 391 - protein, 10 aa, Artificial Sequence
  Synthetic Polypeptide
VRHKLKRVGS

SEQ ID NO: 392 - protein, 12 aa, Artificial Sequence
  Synthetic Polypeptide
GHGTGSTGSGSS

SEQ ID NO: 393 - protein, 7 aa, Artificial Sequence
  Synthetic Polypeptide
MSRPDPA

SEQ ID NO: 394 - protein, 12 aa, Artificial Sequence
  Synthetic Polypeptide
GSAGSAAGSGEF

SEQ ID NO: 395 - protein, 12 aa, Artificial Sequence
  Synthetic Polypeptide
SGSETPGTSESA

SEQ ID NO: 396 - protein, 21 aa, Artificial Sequence
  Synthetic Polypeptide
SGSETPGTSESATPEGGSGGS

SEQ ID NO: 397 - protein, 4 aa, Artificial Sequence
  Synthetic Polypeptide
GGSM

1. A method of incorporating an unnatural amino acid into a protein of interest at one or more specific position(s), the method comprising:
(i) contacting a polynucleotide encoding the protein of interest with a fusion protein comprising (a) a guide nucleotide sequence-programmable DNA-binding protein domain; and (b) a cytosine deaminase domain, wherein the fusion protein is associated with a guide nucleotide sequence, and whereby the contacting results in changing a target codon to a stop codon or a rare codon via deamination of a cytosine (C) base;
(ii) using the polynucleotide containing the stop or rare codon in a translation system, whereby the unnatural amino acids are incorporated into the protein of interest at the suppressible stop codon or rare codon during translation of the protein,
wherein the polynucleotide comprises a coding strand and a complementary strand.

2. The method of claim 1, wherein the guide nucleotide sequence-programmable DNA binding protein domain is selected from the group consisting of: nuclease inactive Cas9 (dCas9) domains, nuclease inactive Cpf1 domains, nuclease inactive Argonaute domains, and variants thereof.

3-9. (canceled)

10. The method of claim 1, wherein the cytosine deaminase domain comprises an apolipoprotein B mRNA-editing complex (APOBEC) family deaminase.

11. (canceled)

12. The method of claim 1, wherein the cytosine deaminase comprises an amino acid sequence of any one of SEQ ID NOs: 270-288 and 378-381.

13. The method of claim 1, wherein the fusion protein of (a) further comprises a uracil glycosylase inhibitor (UGI) domain.

14-15. (canceled)

16. The method of claim 1, wherein the cytosine deaminase and the guide nucleotide sequence-programmable DNA-binding protein domain is fused via an optional linker.

17-21. (canceled)

22. The method of claim 1, wherein the fusion protein comprises the amino acid sequence of any one of SEQ ID NO: 291-295 and 382-386.

23. The method of claim 1, wherein the guide nucleotide sequence is a RNA.

24. (canceled)

25. The method of claim 1, wherein the target codon is changed to a stop codon selected from the group consisting of TAG (Amber), TGA(Opal), and TAA (Ochre).

26-38. (canceled)

39. The method of claim 1, wherein the target codon is changed to a rare codon selected from the group consisting of AGG, ATA, AGT, TTT, and TTC.

40-54. (canceled)

55. The method of claim 1, wherein the translation system comprises:
(a) an orthogonal tRNA (OtRNA);
(b) an orthogonal aminoacyl tRNA synthetase (ORS); and
(c) an unnatural amino acid,
wherein the ORS preferentially aminoacylates the OtRNA with the unnatural amino acid, and the OtRNA recognizes at least one suppressible stop codon.

56-83. (canceled)

84. The method of claim 1, wherein 1, 2, 3, 4, 5, 6, 7, 8, or more types of unnatural amino acids are incorporated into the protein of interest simultaneously.

85. The method of claim 1, wherein the unnatural amino acid is incorporated into 1, 2, 3, 4, 5, 6, 7, 8, 9, 10, 11, 12, 13, 14, 15, or more proteins of interest.

86. The method of claim 1, wherein the unnatural amino acid is incorporated proteome-wide.

87-96. (canceled)

97. A cell comprising the fusion protein and the translation system of claim 1.

98. A cell comprising a polynucleotide encoding the fusion protein and the guide nucleotide sequence of claim 1.

99-100. (canceled)

101. A composition comprising the fusion protein and the translation system of claim 1.

102. (canceled)

103. A kit comprising nucleic acid vectors for the expression of the fusion protein and the guide nucleotide sequence of claim 1.

104-106. (canceled)

107. A kit for in vitro incorporation of unnatural amino acids into a protein of interest comprising:
(i) a fusion protein comprising (a) a guide nucleotide sequence-programmable DNA-binding protein domain; and (b) a cytosine deaminase domain, wherein the fusion protein is associated with a guide nucleotide sequence, and whereby the contacting results in changing a target codon to a stop codon or a rare codon via deamination of a cytosine (C) base; and
(ii) a translation system comprising (a) an orthogonal tRNA (OtRNA); (b) an orthogonal aminoacyl tRNA synthetase (ORS); and (c) an unnatural amino acid, wherein the ORS preferentially aminoacylates the OtRNA with the unnatural amino acid, and the OtRNA recognizes at least one suppressible stop codon.

108-110. (canceled)

111. A method of incorporating an unnatural amino acid into a protein of interest at one or more specific position(s), the method comprising:
(i) contacting a polynucleotide encoding the protein of interest with a fusion protein comprising (a) a programmable DNA-binding protein domain; and (b) a deaminase domain, whereby the contacting results in changing a target codon to a stop codon or a rare codon via deamination of a target base; and
(ii) using the polynucleotide containing the stop or rare codon in a translation system, whereby the unnatural amino acids are incorporated into the protein of interest at the suppressible stop codon or rare codon during translation of the protein,
wherein the polynucleotide comprises a coding strand and a complementary strand.

112-118. (canceled)
